(19) United States
(12) Patent Application Publication
(10) Pub. No.: US 2019/0055578 A1
(43) Pub. Date: Feb. 21, 2019

(54) DELIVERY OF CENTRAL NERVOUS SYSTEM TARGETING POLYNUCLEOTIDES

(71) Applicant: Voyager Therapeutics, Inc., Cambridge, MA (US)

(72) Inventors: Dinah Wen-Yee SAH, Hopkinton, MA (US); Jinzhao HOU, Belmont, MA (US); Martin GOULET, Weston, MA (US); Adrian Philip KELLS, Arlington, MA (US); Pengcheng ZHOU, Lexington, MA (US); Gregory Robert STEWART, Plymouth, MN (US)

(73) Assignee: Voyager Therapeutics, Inc., Cambridge, MA (US)

(21) Appl. No.: 15/771,376

(22) PCT Filed: Oct. 28, 2016
(86) PCT No.: PCT/US2016/059302

§ 371 Date: Apr. 26, 2018

Related U.S. Application Data
(60) Provisional application No. 62/248,220, filed on Oct. 29, 2015.
(60) Provisional application No. 62/248,223, filed on Oct. 29, 2015.
(60) Provisional application No. 62/279,420, filed on Jan. 15, 2016.

(51) Int. Cl. C12N 15/86; A61K 9/00; C07K 14/47; A61M 5/142; A61M 25/00

(52) U.S. Cl. CPC C12N 15/86; A61K 9/0085; C07K 14/47; C12N 2750/14145; A61M 25/0023; C12N 2750/14143; A61M 5/14276

(57) ABSTRACT

The invention relates to compositions and methods for the preparation, administration, manufacture and therapeutic use of viral particles for the treatment of CNS disorders.

### CROSS REFERENCE TO RELATED APPLICATIONS

[0001] This application claims the benefit of U.S. Provisional Application No. 62/248,220 filed Oct. 29, 2015, entitled Central Nervous System Targeting Polynucleotides, U.S. Provisional Application No. 62/248,223 filed Oct. 29, 2015, entitled Methods of Delivery to the Central Nervous System, and U.S. Provisional Application No. 62/279,420 filed Jan. 15, 2016, entitled Central Nervous System Targeting Polynucleotides, the contents of each are herein incorporated by reference in their entirety.

### REFERENCE TO THE SEQUENCE LISTING

[0002] The present application is being filed along with a Sequence Listing in electronic format. The Sequence Listing is provided as a file entitled 20571034PCT_SEQLST.txt created on Oct. 27, 2016 which is 3,463,093 bytes in size. The information in the electronic format of the sequence listing is incorporated herein by reference in its entirety.

### FIELD OF THE INVENTION

[0003] The present invention relates to compositions, methods and processes for the formulation and for the administration of a therapeutic agent using parvovirus e.g., adeno-associated virus (AAV) to the central nervous system (CNS), CNS tissues, CNS structures or CNS cells.

### BACKGROUND OF THE INVENTION

[0004] Use of adeno-associated virus (AAV) to deliver therapeutic agents (i.e., transgenes) to the central nervous system offers a means to achieve a widespread distribution of delivered genes in the CNS. Tissue of the CNS is highly heterogeneous and consists of different cell types including different types of neurons (e.g., excitatory and inhibitory neurons) and glial cells (e.g., oligodendrocytes, astrocytes and microglia). The characterization of different AAV capsid serotypes reveals that different AAV serotypes have different efficiency of transduction to different CNS tissues (e.g., cervical spinal cord and hippocampus) and cells (e.g., neurons or glial cells). Inclusion of different promoters within the AAV serotypes can further enhance transduction to CNS tissues and cells.

[0005] Studies, such as those referenced herein examining the targeting of specific tissues and cell types of the CNS by AAV capsids, address one part of the problem of effective clinical treatment of CNS disorders by AAV delivery of therapeutic transgenes. The appropriate expression of the therapeutic transgene encoding the delivered payload, both temporally and spatially within the desired cell type, is critical to achieving the desired ameliorative effect. The properties of regulatory elements that drive expression of exogenous payloads from AAV genomes have not been well characterized.

[0006] On this background there remains, however, much work to be done to optimize delivery of therapeutic agents to the central nervous system. A better understanding and optimizing delivery parameters for viral particle distribution, as described herein, will lead to safer and more effective gene therapy. AAVs have emerged as one of the most widely studied and utilized viral particles for gene transfer to mammalian cells. See, e.g., Tratschin et al., Mol. Cell Biol., 5(11):3251-3260 (1985) and Grimm et al., Hum. Gene Ther., 10(15):2445-2450 (1999).

[0007] The present invention addresses the need for new technologies by providing AAV-based compositions and complexes which go beyond those of the art by providing for administration and/or delivery of recombinant adeno-associated virus (AAV) particles in the treatment of diseases or disorders of the CNS, CNS tissues and/or CNS structures.

[0008] While delivery is exemplified in the AAV context, other viral vectors, non-viral vectors, nanoparticles, or liposomes may be similarly used to deliver the therapeutic transgenes and include, but are not limited to, vector genomes of any of the AAV serotypes or other parvoviral viral delivery vehicles or lentivirus, etc. The observations and teachings may extend to any macromolecular structure, including modified cells, introduced into the CNS in the manner as described herein.

### SUMMARY OF THE INVENTION

[0009] The present invention relates to AAV particles comprising AAV capsid serotypes with specific cell tropisms. Methods for delivering the AAV particles are also included in the present invention.

[0010] The present invention provides AAV particles and methods of delivering AAV particles to cells and tissues of the central nervous system.

[0011] Provided herein are AAV particles comprising a vector genome packaged in a capsid.

[0012] Provided herein are methods for increasing the level of a protein in the CNS of a subject by administering a subject an effective amount of an AAV particle.

[0013] Provided herein are methods for increasing distribution of AAV particles in the CNS of a subject by administering a subject an effect amount of an AAV particle. Distribution may be increased by a percentage such as, but not limited to, 1%, 2%, 3%, 4%, 5%, 6%, 7%, 8%, 9%, 10%, 11%, 12%, 13%, 14%, 15%, 16%, 17%, 18%, 19%, 20%, 21%, 22%, 23%, 24%, 25%, 26%, 27%, 28%, 29%, 30%, 31%, 32%, 33%, 34%, 35%, 36%, 37%, 38%, 39%, 40%, 41%, 42%, 43%, 44%, 45%, 46%, 47%, 48%, 49%, 50%, 51%, 52%, 53%, 54%, 55%, 60%, 65%, 70%, 75%, 80%, 85%, 90%, 95% or more than 95%.

[0014] In one embodiment, the AAV particle may comprise a vector genome packaged in a capsid, and the capsid may be, but is not limited to, AAVrh.10 (AAVrh10), AAV-DJ (AAVDJ), AAV-DJ8 (AAVDJ8), AAV1, AAV2, AAV2G9, AAV3, AAV3a, AAV3b, AAV3-3, AAV4, AAV4-4, AAV5, AAV6, AAV6.1, AAV6.2, AAV6.1.2, AAV7, AAV7.2, AAV8, AAV9, AAV9.11, AAV9.13, AAV9.16, AAV9.24, AAV9.45, AAV9.47, AAV9.61, AAV9.68, AAV9.84, AAV9.9, AAV10, AAV11, AAV12, AAV16.3, AAV24.1, AAV27.3, AAV42.12, AAV42-1b, AAV42-2, AAV42-3a, AAV42-3b, AAV42-4, AAV42-5a, AAV42-5b, AAV42-6b, AAV42-8, AAV42-10, AAV42-11, AAV42-12, AAV42-13, AAV42-15, AAV42-aa, AAV43-1, AAV43-12, AAV43-20, AAV43-21, AAV43-23, AAV43-25, AAV43-5, AAV44.1, AAV44.2, AAV44.5, AAV223.1, AAV223.2, AAV223.4, AAV223.5, AAV223.6, AAV223.7, AAV1-7/rh.48, AAV1-8/rh.49, AAV2-15/rh.62, AAV2-3/rh.61, AAV2-4/rh.50, AAV2-5/rh.51, AAV3.1/hu.6, AAV3.1/hu.9, AAV3-9/rh.52, AAV3-11/rh.53, AAV4-8/r11.64, AAV4-9/rh.54, AAV4-19/rh.55, AAV5-3/rh.57, AAV5-22/rh.58, AAV7.3/hu.7, AAV16.8/hu.10, AAV16.12/hu.11, AAV29.3/bb.1, AAV29.5/bb.2, AAV106.1/hu.37, AAV114.3/hu.40, AAV127.2/hu.41, AAV127.5/hu.42, AAV128.3/hu.44, AAV130.4/hu.48, AAV145.1/hu.53, AAV145.5/hu.54, AAV145.6/hu.55, AAV161.10/hu.60, AAV161.6/hu.61, AAV33.12/hu.17, AAV33.4/hu.15, AAV33.8/hu.16, AAV52/hu.19, AAV52.1/hu.20, AAV58.2/hu.25, AAVA3.3, AAVA3.4, AAVA3.5, AAVA3.7, AAVC1, AAVC2, AAVC5, AAVF3, AAVF5, AAVH2, AAVrh.72, AAVhu.8, AAVrh.68, AAVrh.70, AAVpi.1, AAVpi.3, AAVpi.2, AAVrh.60, AAVrh.44, AAVrh.65, AAVrh.55, AAVrh.47, AAVrh.69, AAVrh.45, AAVrh.59, AAVhu.12, AAVH6, AAVLK03, AAVH-1/hu.1, AAVH-5/hu.3, AAVLG-10/rh.40, AAVLG-4/rh.38, AAVLG-9/hu.39, AAVN721-8/rh.43, AAVCh.5, AAVCh.5R1, AAVcy.2, AAVcy.3, AAVcy.4, AAVcy.5, AAVCy.5R1, AAVCy.5R2, AAVCy.5R3, AAVCy.5R4, AAVcy.6, AAVhu.1, AAVhu.2, AAVhu.3, AAVhu.4, AAVhu.5, AAVhu.6, AAVhu.7, AAVhu.9, AAVhu.10, AAVhu.11, AAVhu.13, AAVhu.15, AAVhu.16, AAVhu.17, AAVhu.18, AAVhu.20, AAVhu.21, AAVhu.22, AAVhu.23.2, AAVhu.24, AAVhu.25, AAVhu.27, AAVhu.28, AAVhu.29, AAVhu.29R, AAVhu.31, AAVhu.32, AAVhu.34, AAVhu.35, AAVhu.37, AAVhu.39, AAVhu.40, AAVhu.41, AAVhu.42, AAVhu.43, AAVhu.44, AAVhu.44R1, AAVhu.44R2, AAVhu.44R3, AAVhu.45, AAVhu.46, AAVhu.47, AAVhu.48, AAVhu.48R1, AAVhu.48R2, AAVhu.48R3, AAVhu.49, AAVhu.51, AAVhu.52, AAVhu.54, AAVhu.55, AAVhu.56, AAVhu.57, AAVhu.58, AAVhu.60, AAVhu.61, AAVhu.63, AAVhu.64, AAVhu.66, AAVhu.67, AAVhu.14/9, AAVhu.t 19, AAVrh.2, AAVrh.2R, AAVrh.8, AAVrh.8R, AAVrh.12, AAVrh.13, AAVrh.13R, AAVrh.14, AAVrh.17, AAVrh.18, AAVrh.19, AAVrh.20, AAVrh.21, AAVrh.22, AAVrh.23, AAVrh.24, AAVrh.25, AAVrh.31, AAVrh.32, AAVrh.33, AAVrh.34, AAVrh.35, AAVrh.36, AAVrh.37, AAVrh.37R2, AAVrh.38, AAVrh.39, AAVrh.40, AAVrh.46, AAVrh.48, AAVrh.48.1, AAVrh.48.1.2, AAVrh.48.2, AAVrh.49, AAVrh.51, AAVrh.52, AAVrh.53, AAVrh.54, AAVrh.56, AAVrh.57, AAVrh.58, AAVrh.61, AAVrh.64, AAVrh.64R1, AAVrh.64R2, AAVrh.67, AAVrh.73, AAVrh.74, AAVrh8R, AAVrh8R A586R mutant, AAVrh8R R533A mutant, AAAV, BAAV, caprine AAV, bovine AAV, AAVhE1.1, AAVhEr1.5, AAVhER1.14, AAVhEr1.8, AAVhEr1.16, AAVhEr1.18, AAVhEr1.35, AAVhEr1.7, AAVhEr1.36, AAVhEr2.29, AAVhEr2.4, AAVhEr2.16, AAVhEr2.30, AAVhEr2.31, AAVhEr2.36, AAVhER1.23, AAVhEr3.1, AAV2.5T, AAV-PAEC, AAV-LK01, AAV-LK02, AAV-LK03, AAV-LK04, AAV-LK05, AAV-LK06, AAV-LK07, AAV-LK08, AAV-LK09, AAV-LK10, AAV-LK11, AAV-LK12, AAV-LK13, AAV-LK14, AAV-LK15, AAV-LK16, AAV-LK17, AAV-LK18, AAV-LK19, AAV-PAEC2, AAV-PAEC4, AAV-PAEC6, AAV-PAEC7, AAV-PAEC8, AAV-PAEC11, AAV-PAEC12, AAV-2-pre-miRNA-101, AAV-8h, AAV-8b, AAV-h, AAV-b, AAV SM 10-2, AAV Shuffle 100-1, AAV Shuffle 100-3, AAV Shuffle 100-7, AAV Shuffle 10-2, AAV Shuffle 10-6, AAV Shuffle 10-8, AAV Shuffle 100-2, AAV SM 10-1, AAV SM 10-8, AAV SM 100-3, AAV SM 100-10, BNP61 AAV, BNP62 AAV, BNP63 AAV, AAVrh.50, AAVrh.43, AAVrh.62, AAVrh.48, AAVhu.19, AAVhu.11, AAVhu.53, AAV4-8/rh.64, AAVLG-9/hu.39, AAV54.5/hu.23, AAV54.2/hu.22, AAV54.7/hu.24, AAV54.1/hu.21, AAV54.4R/hu.27, AAV46.2/hu.28, AAV46.6/hu.29, AAV128.1/hu.43, true type AAV (ttAAV), UPENN AAV 10 and/or Japanese AAV 10 serotypes, and variants thereof.

[0015] In one embodiment, the vector genome comprises a promoter. The promoter may be, but is not limited to, CBA, CMV, PGK, FXN, H1, and fragments or variants thereof.

[0016] In one embodiment, the AAV particles may be administered by a route such as, but not limited to, intrathecal (IT) administration, intraparenchymal (IPa) administration, and/or intracerebroventricular (ICV) administration

[0017] In one embodiment, the AAV particles may be administered by intrathecal (IT) administration. The IT administration may be by bolus or prolonged infusion. The IT administration may occur in at least one location in at least one region of the spine of a subject. The region may be, but is not limited to, the cervical region (C1, C2, C3, C4, C5, C6, and C7), thoracic region (T1, T2, T3, T3, T4, T5, T6, T7, T8, T9, T10, T11, and T12), lumbar region (L1, L2, L3, L4, and L5) and/or sacral region (S1, S2, S3, S4, and S5). In one embodiment, the IT administration may occur in one location such as, but not limited to, C1, C5, T1, L1 or L5. In one embodiment, the IT administration may occur in three locations such as, but not limited to, L1, T1 and C5.

[0018] In one embodiment, the volume of IT administration by any of the methods described herein is less than 1 mL.

[0019] In one embodiment, the volume of IT administration by any of the methods described herein is between about 0.1 mL to about 120 mL.

[0020] In one embodiment, during IT administration a subject may be in a position such as, but not limited to, supine, prone, right lateral recumbent (RLR), left lateral recumbent (LLR), Fowler's, and Trendelenburg.

[0021] In one embodiment, during IT administration a subject may be at an angle between approximately horizontal 00 to about vertical 90° for the duration of the administration. The angle may be, but is not limited to, 0°, 1°, 2°, 3°, 4°, 5°, 6°, 7°, 8°, 9°, 10°, 11°, 12°, 13°, 14°, 15°, 16°, 17°, 18°, 19°, 20°, 21°, 22°, 23°, 24°, 25°, 26°, 27°, 28°, 29°, 30°, 31°, 32°, 33°, 34°, 35°, 36°, 37°, 38°, 39°, 40°, 41°, 42°, 43°, 44°, 45°, 46°, 47°, 48°, 49°, 50°, 51°, 52°, 53°, 54°, 55°, 56°, 57°, 58°, 59°, 60°, 61°, 62°, 63°, 64°, 65°, 66°, 67°, 68°, 69°, 70°, 71°, 72°, 73°, 74°, 75°, 76°, 77°, 78°, 79°, 80°, 81°, 82°, 83°, 84°, 85°, 86°, 87°, 88°, 89°, and 90°.

[0022] In one embodiment, the administration route in any of the methods described herein is IT administration via prolonged infusion. The volume of prolonged infusion may be a volume such as, but not limited to, more than 1 mL, at least 3 mL, 3 mL, at least 10 mL, and 10 mL. The duration of the prolonged infusion may be, but is not limited to, 0.17, 0.33, 0.5, 0.67, 0.83, 1, 2, 3, 4, 5, 6, 7, 8, 9, 10, 11, 12, 13, 14, 15, 16, 17, 18, 19, 20, 21, 22, 23, 24, 25, 26, 27, 28, 29, 30, 31, 32, 33, 34, 35, and 36 hour(s). The prolonged infusion may occur at a rate which is constant, ramped, or complex. In one aspect, the ramped rate increases over the duration of the prolonged infusion. In one aspect, the complex rate alternates between high and low rates over the duration of the prolonged infusion. In one aspect, the rate of prolonged infusion may be, but is not limited to, 0.1, 0.2, 0.3, 0.4, 0.5, 0.6, 0.7, 0.8, 0.9, 1.0, 1.1, 1.2, 1.3, 1.4, 1.5, 1.6, 1.7, 1.8, 1.9, 2.0, 2.1, 2.2, 2.3, 2.4, 2.5, 2.6, 2.7, 2.8, 2.9, 3.0, 3.1, 3.2, 3.3, 3.4, 3.5, 3.6, 3.7, 3.8, 3.9, 4.0, 4.1, 4.2, 4.3, 4.4, 4.5, 4.6, 4.7, 4.8, 4.9, 5.0, 5.1, 5.2, 5.3, 5.4, 5.5, 5.6, 5.7, 5.8, 5.9, 6.0, 6.1, 6.2, 6.3, 6.4, 6.5, 6.6, 6.7, 6.8, 6.9, 7.0, 7.1, 7.2, 7.3, 7.4, 7.5, 7.6, 7.7, 7.8, 7.9, 8.0, 8.1, 8.2, 8.3, 8.4, 8.5, 8.6, 8.7, 8.8, 8.9, 9.0, 9.1, 9.2, 9.3, 9.4, 9.5, 9.6, 9.7, 9.8, 9.9, 10.0, 10.1, 10.2, 10.3, 10.4, 10.5, 10.6, 10.7, 10.8, 10.9, 11.0, 11.1, 11.2, 11.3, 11.4, 11.5, 11.6, 11.7, 11.8, 11.9, 12.0, 12.1, 12.2, 12.3, 12.4, 12.5, 12.6, 12.7, 12.8, 12.9, 13.0, 13.1, 13.2, 13.3, 13.4, 13.5, 13.6, 13.7, 13.8, 13.9, 14.0, 14.1, 14.2, 14.3, 14.4, 14.5, 14.6, 14.7, 14.8, 14.9, 15.0, 15.1, 15.2, 15.3, 15.4, 15.5, 15.6, 15.7, 15.8, 15.9, 16.0, 16.1, 16.2, 16.3, 16.4, 16.5, 16.6, 16.7, 16.8, 16.9, 17.0, 17.1, 17.2, 17.3, 17.4, 17.5, 17.6, 17.7, 17.8, 17.9, 18.0, 18.1, 18.2, 18.3, 18.4, 18.5, 18.6, 18.7, 18.8, 18.9, 19.0, 19.1, 19.2, 19.3, 19.4, 19.5, 19.6, 19.7, 19.8, 19.9, 20.0, 20.1, 20.2, 20.3, 20.4, 20.5, 20.6, 20.7, 20.8, 20.9, 21.0, 21.1, 21.2, 21.3, 21.4, 21.5, 21.6, 21.7, 21.8, 21.9, 22.0, 22.1, 22.2, 22.3, 22.4, 22.5, 22.6, 22.7, 22.8, 22.9, 23.0, 23.1, 23.2, 23.3, 23.4, 23.5, 23.6, 23.7, 23.8, 23.9, 24.0, 24.1, 24.2, 24.3, 24.4, 24.5, 24.6, 24.7, 24.8, 24.9, and 25.0 mL/hour. In one aspect, the rate of prolonged infusion is a rate that exceeds the rate of cerebrospinal fluid (CSF) absorption.

[0023] In one embodiment, the administration route may be ICV administration. The ICV administration may be to at least one location such as, but not limited to, right lateral ventricle, left lateral ventricle, third ventricle, fourth ventricle, interventricular foramina (also called foramina of Monro), cerebral aqueduct, central canal, median aperture, right lateral aperture, left lateral aperture, and/or perivascular space in the brain.

[0024] In one embodiment, the total dose of administration of the AAV particles described herein may be, but is not limited to, between 1×10⁶ VG and about 1×10¹⁶ VG. The total dose may be, but is not limited to, about 1×10⁶, 2×10⁶, 3×10⁶, 4×10⁶, 5×10⁶, 6×10⁶, 7×10⁶, 8×10⁶, 9×10⁶, 1×10⁷, 2×10⁷, 3×10⁷, 4×10⁷, 5×10⁷, 6×10⁷, 7×10⁷, 8×10⁷, 9×10⁷, 1×10⁸, 2×10⁸, 3×10⁸, 4×10⁸, 5×10⁸, 6×10⁸, 7×10⁸, 8×10⁸, 9×10⁸, 1×10⁹, 2×10⁹, 3×10⁹, 4×10⁹, 5×10⁹, 6×10⁹, 7×10⁹, 8×10⁹, 9×10⁹, 1×10¹⁰, 2×10¹⁰, 3×10¹⁰, 4×10¹⁰, 5×10¹⁰, 6×10¹⁰, 7×10¹⁰, 8×10¹⁰, 9×10¹⁰, 1×10¹¹, 2×10¹¹, 3×10¹¹, 4×10¹¹, 5×10¹¹, 6×10¹¹, 7×10¹¹, 8×10¹¹, 9×10¹¹, 1×10¹², 2×10¹², 3×10¹², 4×10¹² 5×10¹², 6×10¹², 7×10¹², 8×10¹², 9×10¹², 1×10¹³, 2×10¹³, 3×10¹³, 4×10¹³, 5×10¹³, 6×10¹³, 7×10¹³, 8×10¹³, 9×10¹³, 1×10¹⁴, 2×10¹⁴, 3×10¹⁴, 4×10¹⁴, 5×10¹⁴, 6×10¹⁴, 7×10¹⁴, 8×10¹⁴, 9×10¹⁴, 1×10¹⁵, 2×10¹⁵, 3×10¹⁵, 4×10¹⁵, 5×10¹⁵, 6×10¹⁵, 7×10¹⁵, 8×10¹⁵, 9×10¹⁵, and 1×10¹⁶ VG.

[0025] In one embodiment, the concentration of the AAV particles described herein delivered to a subject may be, but is not limited to, 1×10⁶, 2×10⁶, 3×10⁶, 4×10⁶, 5×10⁶, 6×10⁶, 7×10⁶, 8×10⁶, 9×10⁶, 1×10⁷, 2×10⁷, 3×10⁷, 4×10⁷, 5×10⁷, 6×10⁷, 7×10⁷, 8×10⁷, 9×10⁷, 1×10⁸, 2×10⁸, 3×10⁸, 4×10⁸, 5×10⁸, 6×10⁸, 7×10⁸, 8×10⁸, 9×10⁸, 1×10⁹, 2×10⁹, 3×10⁹, 4×10⁹, 5×10⁹, 6×10⁹, 7×10⁹, 8×10⁹, 9×10⁹, 1×10¹⁰, 2×10¹⁰, 3×10¹⁰, 4×10¹⁰, 5×10¹⁰, 6×10¹⁰, 7×10¹⁰, 8×10¹⁰, 9×10¹⁰, 1×10¹¹, 2×10¹¹, 3×10¹¹, 4×10¹¹, 5×10¹¹, 6×10¹¹, 7×10¹¹, 8×10¹¹, 9×10¹¹, 1×10¹², 2×10¹², 3×10¹², 4×10¹² 5×10¹², 6×10¹², 7×10¹², 8×10¹², 9×10¹², 1×10¹³, 2×10¹³, 3×10¹³, 4×10¹³, 5×10¹³, 6×10¹³, 7×10¹³, 8×10¹³, 9×10¹³, 1×10¹⁴, 2×10¹⁴, 3×10¹⁴, 4×10¹⁴, 5×10¹⁴, 6×10¹⁴, 7×10¹⁴, 8×10¹⁴, 9×10¹⁴, 1×10¹⁵, 2×10¹⁵, 3×10¹⁵, 4×10¹⁵, 5×10¹⁵, 6×10¹⁵, 7×10¹⁵, 8×10¹⁵, 9×10¹⁵, and 1×10¹⁶ VG/mL.

[0026] In one embodiment, delivery devices may be used to administer the AAV particles using the methods described herein. As a non-limiting example, an infusion pump or device in combination with a catheter may be used during IT administration. The catheter may be a single or multi-port catheter and the catheter may have a flexible, rigid and/or retractable catheter. As another non-limiting example, a head trajectory guide, head trajectory frame, and/or a skull frame is used for ICV administration. Optionally, neuronavigational software may also be used for ICV administration.

[0027] The details of one or more embodiments of the invention are set forth in the accompanying description below. Other features, objects and advantages of the invention will be apparent from the description. In the description, the singular forms also include the plural unless the context clearly dictates otherwise. Unless defined otherwise, all technical and scientific terms used herein have the same meaning as commonly understood by one of ordinary skill in the art to which this invention belongs. In the case of conflict, the present description will control.

### DETAILED DESCRIPTION OF THE INVENTION

[0028] Described herein are compositions, methods, processes, kits and devices for the design, preparation, manufacture and/or formulation of AAV particles. In some embodiments, payload may be encoded by payload construct and contained within plasmids or vectors or recombinant adeno-associated viruses (AAVs).

[0029] The present invention provides AAV capsid serotypes with specific CNS cell type tropism, expression levels and bio-distribution in the CNS. Additionally, the present invention provides regulatory elements and codon optimization of the AAV genome useful in vitro and in vivo in both cell lines and primary CNS cell types. Accordingly, the present invention provides novel AAV particles with novel combinations of capsid and/or payload that target specific cells and/or tissue in a particular anatomic location in the CNS.

[0030] The present invention provides administration and/or delivery methods for vectors and viral particles, e.g., AAV particles, for the treatment or amelioration of diseases or disorders of the CNS. Such methods may involve the inhibition of gene expression, gene replacement or gene activation. Such outcomes are achieved by utilizing the methods and compositions taught herein.

[0031] The present disclosure provides a method of delivering to a subject, including a mammalian subject, any of the described AAV particles comprising administering to the subject said AAV particle, or administering to the subject a particle comprising said AAV particle, or administering to the subject any of the described compositions, including pharmaceutical compositions.

### Parvoviridae Virus, Viral Particle and Production of Viral Particles

[0032] Viruses of the Parvoviridae family are small non-enveloped icosahedral capsid viruses characterized by a single stranded DNA genome. Parvoviridae family viruses consist of two subfamilies: Parvovirinae, which infect vertebrates, and Densovirinae, which infect invertebrates. The parvoviruses and other members of the Parvoviridae family are generally described in Kenneth I. Berns, “Parvoviridae: The Viruses and Their Replication,” Chapter 69 in FIELDS VIROLOGY (3d Ed. 1996), the contents of which is incorporated by reference in its entirety.

[0033] The genome of the viruses of the Parvoviridae family may be modified to contain a minimum of components for the assembly of a functional recombinant virus which is loaded with or engineered to express or deliver a desired nucleic acid construct or payload, e.g., a transgene, polypeptide-encoding polynucleotide or modulatory nucleic acid, which may be delivered to a target cell, tissue or organism. As used herein, a “viral particle” refers to a functional recombinant virus.

[0034] The Parvoviridae family may be used as a biological tool due to a relatively simple structure that may be manipulated with standard molecular biology techniques.

[0035] The Parvoviridae family comprises the Dependovirus genus which includes adeno-associated viruses (AAVs) which are capable of replication in vertebrate hosts including, but not limited to, human, primate, bovine, canine, equine, and ovine species. The naturally occurring AAV Cap gene expresses VP1, VP2, and VP3 capsid proteins are encoded by a single open reading frame of the Cap gene under control of the p40 promoter. In one embodiment, nucleotide sequences encoding VP1, VP2 and VP3 proteins and/or amino acid sequences of AAV VP capsid proteins may be modified for increased efficiency to target to the central nervous system (e.g., CNS tissue tropism). Any of the VP genes of the serotypes selected from, but not limited to, AAV1, AAV2, AAV3, AAV4, AAV5, AAV6, AAV7, AAV8, AAV9, AAV10, and AAV11, AAV12, AAVrh8, AAVrh10, AAV-DJ, and AAV-DJ/8 capsid serotypes, or variants thereof (e.g., AAV3A and AAV3B) may be modified.

[0036] In one embodiment, the present invention provides administration and/or delivery methods for viral particles.

[0037] In some embodiments, the present invention provides administration and/or delivery methods for viral particles for the treatment and/or amelioration of diseases or disorders of the CNS. As a non-limiting example, the disease or disorder of the CNS is Alzheimer's Diseases (AD), Amyotrophic lateral sclerosis (ALS), Creutzfeldt-Jakob Disease, Huntingtin's disease (HD), Friedreich's ataxia (FA or FRDA), Parkinson Disease (PD), Multiple System Atrophy (MSA), Spinal Muscular Atrophy (SMA), Multiple Sclerosis (MS), Primary progressive aphasia, Progressive supranuclear palsy, Dementia, Brain Cancer, Degenerative Nerve Diseases, Encephalitis, Epilepsy, Genetic Brain Disorders that cause neurodegeneration, Retinitis pigmentosa (RP), Head and Brain Malformations, Hydrocephalus, Stroke, Prion disease, Infantile neuronal ceroid lipofuscinosis (INCL) (a neurodegenerative disease of children caused by a deficiency in the lysosomal enzyme palmitoyl protein thioesterase-1 (PPT1)).

[0038] The present disclosure provides a method for the generation of viral particles, by viral genome replication in a viral replication cell comprising contacting the viral replication cell with a payload construct vector and a viral construct vector.

[0039] The present disclosure provides a method for producing a viral particle having enhanced (increased, improved) transduction efficiency comprising the steps of: 1) co-transfecting competent bacterial cells with a bacmid vector and either a viral construct vector and/or payload construct vector, 2) isolating the resultant viral construct vector and payload construct vector and separately transfecting viral replication cells, 3) isolating and purifying resultant payload and viral construct particles comprising viral construct vector or payload construct vector, 4) co-infecting a viral replication cell with both the payload construct vector and viral construct vector, 5) harvesting and purifying the viral particle comprising a parvoviral genome. Production methods are further disclosed in commonly owned and co-pending International Publication No. WO2015191508, the contents of which are herein incorporated by reference in their entirety.

[0040] In one embodiment, provided are particles comprising nucleic acids and cells (in vivo or in culture) comprising the nucleic acids and/or particles of the invention. Suitable particles include without limitation viral particles (e.g., adenovirus, AAV, herpes virus, vaccinia, poxviruses, baculoviruses, and the like), plasmids, phage, YACs, BACs, and the like as are well known in the art. Such nucleic acids, particles and cells can be used, for example, as reagents (e.g., helper packaging constructs or packaging cells) for the production of modified virus capsids or virus particles as described herein.

[0041] The particles of the invention which comprise nucleic acids include any genetic element (vector) which may be delivered to a host cell, e.g., naked DNA, plasmid, phage, transposon, cosmid, episome, a protein in a non-viral delivery vehicle (e.g., a lipid-based carrier), virus, etc., which transfers the sequences carried thereon. The methods used to construct any embodiment of this invention are known to those with skill in nucleic acid manipulation and include genetic engineering, recombinant engineering, and synthetic techniques. See, e.g., Sambrook et al, Molecular Cloning: A Laboratory Manual, Cold Spring Harbor Press, Cold Spring Harbor, N.Y.

[0042] The nucleic acid (e.g., transgene or payload) can be carried on any suitable vector, e.g., a plasmid, which is delivered to a host cell. The plasmids useful in this invention may be engineered such that they are suitable for replication and, optionally, integration in prokaryotic cells, mammalian cells, or both. These plasmids may contain sequences permitting replication of the transgene in eukaryotes and/or prokaryotes and selection markers for these systems. Selectable markers or reporter genes may include sequences encoding geneticin, hygromicin or purimycin resistance, among others. The plasmids may also contain certain selectable reporters or marker genes that can be used to signal the presence of the vector in bacterial cells, such as ampicillin resistance. Other components of the plasmid may include an origin of replication and an amplicon, such as the amplicon system employing the Epstein Barr virus nuclear antigen. This amplicon system, or other similar amplicon components permit high copy episomal replication in the cells. Preferably, the molecule carrying the transgene or payload is transfected into the cell, where it may exist transiently. Alternatively, the transgene may be stably integrated into the genome of the host cell, either chromosomally or as an episome. In certain embodiments, the transgene may be present in multiple copies, optionally in head-to-head, head-to-tail, or tail-to-tail concatamers. Suitable transfection techniques are known and may readily be utilized to deliver the transgene to the host cell.

### AAV Particle

[0043] In one embodiment, the present invention provides administration and/or delivery methods for AAV particles. As used herein, “AAV particles” refers to a viral particle where the virus is adeno-associated virus (AAV). An AAV particle comprises a viral genome and a capsid. As used herein, “viral genome” is a polynucleotide encoding at least one inverted terminal repeat (ITR), at least one regulatory sequence, and at least one payload.

[0044] The AAV particles described herein may be useful in the fields of human disease, antibodies, viruses, veterinary applications and a variety of in vivo and in vitro settings.

[0045] In some embodiments, AAV particles described herein are useful in the field of medicine for the treatment, palliation and/or amelioration of conditions or diseases such as, but not limited to, blood, cardiovascular, CNS, and/or genetic disorders.

[0046] In some embodiments, AAV particles in accordance with the present invention may be used for the treatment of disorders, and/or conditions, including but not limited to neurological disorders (e.g., Alzheimer's disease, Huntington's disease, autism, Parkinson's disease, Spinal muscular atrophy, Friedreich's ataxia).

[0047] In some embodiments, the present invention provides administration and/or delivery methods for AAV particles for the treatment and/or amelioration of diseases or disorders of the CNS. As a non-limiting example, the disease or disorder of the CNS is Alzheimer's Diseases (AD), Amyotrophic lateral sclerosis (ALS), Creutzfeldt-Jakob Disease, Huntingtin's disease (HD), Friedreich's ataxia (FA or FRDA), Parkinson Disease (PD), Multiple System Atrophy (MSA), Spinal Muscular Atrophy (SMA), Multiple Sclerosis (MS), Primary progressive aphasia, Progressive supranuclear palsy, Dementia, Brain Cancer, Degenerative Nerve Diseases, Encephalitis, Epilepsy, Genetic Brain Disorders that cause neurodegeneration, Retinitis pigmentosa (RP), Head and Brain Malformations, Hydrocephalus, Stroke, Prion disease, Infantile neuronal ceroid lipofuscinosis (INCL) (a neurodegenerative disease of children caused by a deficiency in the lysosomal enzyme palmitoyl protein thioesterase-1 (PPT1)).

[0048] In some embodiments, AAV particles produced according to the present invention may target to deliver and/or to transfer a payload of interest to specific population of cells in specific anatomical regions (e.g., dopaminergic (DAergic) neurons in the Substantia Nigra (SN)) in the central nervous system).

[0049] In one embodiment, the AAV particles of the invention may be a single-stranded AAV (ssAAV) or a self-complementary AAV (scAAV) described herein or known in the art.

### Payload

[0050] AAV particles of the present invention may comprise a nucleic acid sequence encoding at least one “payload.” As used herein, a “payload” refers to one or more polynucleotides or polynucleotide regions encoded by or within a viral genome or an expression product of such polynucleotide or polynucleotide region, e.g., a transgene, a polynucleotide encoding a polypeptide or multi-polypeptide or a modulatory nucleic acid or regulatory nucleic acid.

[0051] The payload may comprise any nucleic acid known in the art which is useful for modulating the expression in a target cell transduced or contacted with the AAV particle carrying the payload. In one embodiment, modulation may be by supplementation of the payload in a target cell or tissue. In one embodiment, modulation may be gene replacement of the payload in a target cell or tissue. In one embodiment, modulation may be by inhibition using a modulatory nucleic acid of the payload in a target cell or tissue.

[0052] In one embodiment, the payload may comprise a combination of coding and non-coding nucleic acid sequences.

mRNA

[0053] In one embodiment, a messenger RNA (mRNA) may be encoded by a payload. As used herein, the term “messenger RNA” (mRNA) refers to any polynucleotide which encodes a polypeptide of interest and which is capable of being translated to produce the encoded polypeptide of interest in vitro, in vivo, in situ, or ex vivo. The components of an mRNA include, but are not limited to, a coding region, a 5′UTR, a 3′UTR, a 5′ cap and a poly-A tail. In some embodiments, the encoded mRNA or any portion of the mRNA be codon optimized.

### Polypeptide

[0054] In one embodiment, the payload encodes a polypeptide which may be a peptide or protein. A protein encoded by the payload may comprise a secreted protein, an intracellular protein, an extracellular protein, a membrane protein, and/or fragment or variant thereof.

[0055] In one embodiment, the encoded proteins may be structural or functional.

[0056] In one embodiment, proteins encoded by the payload construct payload construct include, but are not limited to, mammalian proteins.

[0057] In one embodiment the protein encoded by the payload is between 50-5000 amino acids in length. In some embodiments the protein encoded is between 50-2000 amino acids in length. In some embodiments the protein encoded is between 50-1000 amino acids in length. In some embodiments the protein encoded is between 50-1500 amino acids in length. In some embodiments the protein encoded is between 50-1000 amino acids in length. In some embodiments the protein encoded is between 50-800 amino acids in length. In some embodiments the protein encoded is between 50-600 amino acids in length. In some embodiments the protein encoded is between 50-400 amino acids in length. In some embodiments the protein encoded is between 50-200 amino acids in length. In some embodiments the protein encoded is between 50-100 amino acids in length.

[0058] In some embodiments the peptide encoded by the payload is between 4-50 amino acids in length. In one embodiment, the shortest length of a region of the payload of the present invention encoding a peptide can be the length that is sufficient to encode for a tetrapeptide, a pentapeptide, a hexapeptide, a heptapeptide, an octapeptide, a nonapeptide, or a decapeptide. In another embodiment, the length may be sufficient to encode a peptide of 2-30 amino acids, e.g. 5-30, 10-30, 2-25, 5-25, 10-25, or 10-20 amino acids. The length may be sufficient to encode for a peptide of at least 11, 12, 13, 14, 15, 17, 20, 25 or 30 amino acids, or a peptide that is no longer than 50 amino acids, e.g. no longer than 35, 30, 25, 20, 17, 15, 14, 13, 12, 11 or 10 amino acids.

### Modulatory Nucleic Acids

[0059] In one embodiment, an RNA sequence encoded by the payload may be a tRNA, rRNA, tmRNA, miRNA, RNAi, siRNA, piRNA, shRNA antisense RNA, double stranded RNA, snRNA, snoRNA, and/or long non-coding RNA (IncRNA). These RNA sequences along with siRNA, shRNA, antisense molecules and the like may also be referred to as “modulatory nucleic acids”.

[0060] In one embodiment, the RNA encoded by the payload is a IncRNA or RNAi construct designed to target IncRNA. Non-limiting examples of such IncRNA molecules and RNAi constructs designed to target such IncRNA are taught in International Publication, WO2012/018881, the contents of which are incorporated by reference in their entirety.

[0061] In one embodiment, the payload encodes a microRNA (miRNA) or engineered precursors thereof, as the payload. MicroRNAs (miRNAs) are 19-25 nucleotide RNAs that bind to nucleic acid molecules and down-regulate gene expression either by reducing nucleic acid molecule stability or by inhibiting translation. As a non-limiting example, the payloads described herein may encode one or more microRNA target sequences, microRNA sequences, or microRNA seeds, or any known precursors thereof such as pre- or pri-microRNAs. Such sequences may correspond to any known microRNA such as those taught in US Publication US2005/0261218 and US Publication US2005/0059005, the contents of which are incorporated herein by reference in their entirety.

[0062] A microRNA sequence comprises a “seed” region, i.e., a sequence in the region of positions 2-8 of the mature microRNA, which sequence has perfect Watson-Crick complementarity to the miRNA target sequence. A microRNA seed may comprise positions 2-8 or 2-7 of the mature microRNA. In some embodiments, a microRNA seed may comprise 7 nucleotides (e.g., nucleotides 2-8 of the mature microRNA), wherein the seed-complementary site in the corresponding miRNA target is flanked by an adenine (A) opposed to microRNA position 1. In some embodiments, a microRNA seed may comprise 6 nucleotides (e.g., nucleotides 2-7 of the mature microRNA), wherein the seed-complementary site in the corresponding miRNA target is flanked by an adenine (A) opposed to microRNA position 1. See for example, Grimson A, Farh K K, Johnston W K, Garrett-Engele P, Lim L P, Bartel D P; Mol Cell. 2007 Jul. 6; 27(1):91-105; each of which is herein incorporated by reference in their entirety. The bases of the microRNA seed have complete complementarity with the target sequence.

[0063] In one embodiment, the payload encodes an RNA sequence that may be processed to produce a siRNA, miRNA or other double stranded (ds) or single stranded (ss) gene modulatory nucleic acids or motifs.

[0064] In one embodiment, the siRNA duplexes or dsRNA encoded by the payload can be used to inhibit gene expression in a cell, in particular cells of the CNS. In some aspects, the inhibition of gene expression refers to an inhibition by at least about 20%, 30%, 40%, 50%, 60%, 70%, 80%, 85%, 90%, 95% and 100%. In one aspect, the protein product of the targeted gene may be inhibited by at least about 20%, 30%, 40%, 50%, 60%, 70%, 80%, 85%, 90%, 95% and 100%. The gene can be either a wild type gene or a gene with at least one mutation (mutated gene). The targeted protein may be either a wild type protein or a protein with at least one mutation (mutated protein).

[0065] In one embodiment, the present invention provides methods for treating, or ameliorating a disease or condition associated with abnormal gene and/or protein in a subject in need of treatment, the method comprising administering to the subject any effective amount of at least one AAV particle encoding an siRNA duplex targeting the gene, delivering duplex into targeted cells, inhibiting the gene expression and protein production, and ameliorating symptoms of the disease or condition in the subject.

### Gene Replacement or Activation

[0066] In one embodiment, the payload encodes an RNA sequence to increase the expression of a gene or replace a gene. As a non-limiting example, AAV particles may comprise a viral genome comprising a payload which encodes a normal gene to replace a mutated, defective or nonfunctional copy of that gene in the recipient.

[0067] In some aspects, the increase of gene expression refers to an increase by at least about 20%, 30%, 40%, 50%, 60%, 70%, 80%, 85%, 90%, 95% and 100%. In one aspect, the protein product of the targeted gene may be increased by at least about 20%, 30%, 40%, 50%, 60%, 70%, 80%, 85%, 90%, 95% and 100%.

### Functional Payloads

[0068] In one embodiment, a payload may encode polypeptides that are or can be a fusion protein.

[0069] In one embodiment, a payload may encode polypeptides that are or can be polypeptides having a desired biological activity.

[0070] In one embodiment, a payload may encode polypeptides that are or can be gene products that can complement a genetic defect.

[0071] In one embodiment, a payload may encode polypeptides that are or can be RNA molecules.

[0072] In one embodiment, a payload may encode polypeptides that are or can be transcription factors.

[0073] In one embodiment, a payload may encode polypeptides that are or can be other gene products that are of interest in regulation and/or expression.

[0074] In one embodiment, a payload may comprise nucleotide sequences that provide a desired effect or regulatory function (e.g., transposons, transcription factors).

[0075] The encoded payload may comprise a gene therapy product. In some embodiments, a gene therapy product may comprise a substitute for a non-functional gene that is absent or mutated.

[0076] In one embodiment, a payload may encode polypeptides that are or can be a marker to assess cell transformation and expression.

[0077] In one embodiment, a payload may comprise or encode a selectable marker. A selectable marker may comprise a gene sequence or a protein encoded by a gene sequence expressed in a host cell that allows for the identification, selection, and/or purification of the host cell from a population of cells that may or may not express the selectable marker. In one embodiment, the selectable marker provides resistance to survive a selection process that would otherwise kill the host cell, such as treatment with an antibiotic. In another embodiment, an antibiotic selectable marker may comprise one or more antibiotic resistance factors, including but not limited to neomycin resistance (e.g., neo), hygromycin resistance, kanamycin resistance, and/or puromycin resistance.

[0078] In some embodiments, a payload may comprise or encode any nucleic acid sequence encoding a polypeptide can be used as a selectable marker comprising recognition by a specific antibody.

[0079] In some embodiments, a payload may comprise or encode a selectable marker including, but not limited to, β-lactamase, luciferase, β-galactosidase, or any other reporter gene as that term is understood in the art, including cell-surface markers, such as CD4 or the truncated nerve growth factor (NGFR) (for GFP, see WO 96/23810; Heim et al., Current Biology 2:178-182 (1996); Heim et al., Proc. Natl. Acad. Sci. USA (1995); or Heim et al., Science 373:663-664 (1995); for β-lactamase, see WO 96/30540; the contents of each of which are herein incorporated by reference in its entirety).

[0080] In some embodiments, a payload may comprise or encode a selectable marker comprising a fluorescent protein. A fluorescent protein as herein described may comprise any fluorescent marker including but not limited to green, yellow, and/or red fluorescent protein (GFP, YFP, and/or RFP).

### Payload Construct

[0081] In one embodiment, the AAV particle may comprise a payload construct. As used herein, “payload construct” refers to one or more polynucleotide regions encoding or comprising a payload that is flanked on one or both sides by an inverted terminal repeat (ITR) sequence.

[0082] In one embodiment, the payload construct may comprise more than one payload. As a non-limiting example, a target cell transduced with an AAV particle comprising more than one payload may express each of the payloads in a single cell.

[0083] In some embodiments, the payload construct may encode a coding or non-coding RNA.

[0084] In one embodiment, a payload construct encoding one or more payloads for expression in a target cell may comprise one or more payload or non-payload nucleotide sequences operably linked to at least one target cell-compatible promoter.

[0085] In one embodiment, the ITRs in the AAV particle are derived from the same AAV serotype.

[0086] In one embodiment, the ITRs in the AAV particle are derived from different AAV serotypes.

[0087] In one embodiment, the ITRs in the AAV particle are the same.

[0088] In one embodiment, the ITRs in the AAV particle are different. In one aspect, the ITRs may be derived from the same AAV serotype. In another aspect, the ITRs may be derived from different serotypes.

### Regulatory Sequence

[0089] A person skilled in the art may recognize that expression of a payload in a target cell may require a regulatory sequence.

[0090] In one embodiment, the viral genome comprises a regulatory sequence efficient for expression of the payload.

[0091] In one embodiment, the viral genome comprises a regulatory sequence efficient for driving expression in the cell being targeted.

[0092] In one embodiment, the viral genome comprises a regulatory sequence such as, but not limited to, promoters. As a non-limiting example, the promoter may be (1) CMV promoter, (2) CBA promoter, (3) FRDA or FXN promoter, (4) UBC promoter, (5) GUSB promoter, (6) NSE promoter, (7) Synapsin promoter, (8) MeCP2 promoter, (9) GFAP promoter, (10) H1 promoter, (11) U6 promoter, (12) NFL promoter, (13) NFH promoter, (14) SCN8A promoter, or (15) PGK promoter.

### Promoters

[0093] A person skilled in the art may recognize that expression of a payload in a target cell may require a specific promoter including, but not limited to, a promoter that is species specific, inducible, tissue-specific, or cell cycle-specific (Parr et al., Nat. Med. 3:1145-9 (1997); the contents of which are herein incorporated by reference in its entirety).

[0094] In one embodiment, the viral genome comprises a promoter efficient for expression of the payload.

[0095] In one embodiment, the viral genome comprise a promoter efficient for driving expression in the cell being targeted.

[0096] In one embodiment, the promoter provides expression of a payload for a period of time in targeted tissues such as, but not limited to, nervous system tissues. Expression of the payload may be for a period of 1 hour, 2, hours, 3 hours, 4 hours, 5 hours, 6 hours, 7 hours, 8 hours, 9 hours, 10 hours, 11 hours, 12 hours, 13 hours, 14 hours, 15 hours, 16 hours, 17 hours, 18 hours, 19 hours, 20 hours, 21 hours, 22 hours, 23 hours, 1 day, 2 days, 3 days, 4 days, 5 days, 6 days, 1 week, 8 days, 9 days, 10 days, 11 days, 12 days, 13 days, 2 weeks, 15 days, 16 days, 17 days, 18 days, 19 days, 20 days, 3 weeks, 22 days, 23 days, 24 days, 25 days, 26 days, 27 days, 28 days, 29 days, 30 days, 31 days, 1 month, 2 months, 3 months, 4 months, 5 months, 6 months, 7 months, 8 months, 9 months, 10 months, 11 months, 1 year, 13 months, 14 months, 15 months, 16 months, 17 months, 18 months, 19 months, 20 months, 21 months, 22 months, 23 months, 2 years, 3 years, 4 years, 5 years, 6 years, 7 years, 8 years, 9 years, 10 years, 11 years, 12 years, 13 years, 14 years, 15 years, 16 years, 17 years, 18 years, 19 years, 20 years, 21 years, 22 years, 23 years, 24 years, 25 years, 26 years, 27 years, 28 years, 29 years, 30 years, 31 years, 32 years, 33 years, 34 years, 35 years, 36 years, 37 years, 38 years, 39 years, 40 years, 41 years, 42 years, 43 years, 44 years, 45 years, 46 years, 47 years, 48 years, 49 years, 50 years, 55 years, 60 years, 65 years, or more than 65 years. Expression of the payload may be for 1-5 hours, 1-12 hours, 1-2 days, 1-5 days, 1-2 weeks, 1-3 weeks, 1-4 weeks, 1-2 months, 1-4 months, 1-6 months, 2-6 months, 3-6 months, 3-9 months, 4-8 months, 6-12 months, 1-2 years, 1-5 years, 2-5 years, 3-6 years, 3-8 years, 4-8 years or 5-10 years or 10-15 years, or 15-20 years, or 20-25 years, or 25-30 years, or 30-35 years, or 35-40 years, or 40-45 years, or 45-50 years, or 50-55 years, or 55-60 years, or 60-65 years.

[0097] In one embodiment, the viral genome comprises a region located approximately ˜5 kb upstream of the first exon of the encoded payload, more specifically, there is a 17 bp region located approximately 4.9 kb upstream of the first exon of the encoded frataxin gene in order to allow for expression with the FRDA promoter (See e.g., Puspasari et al. Long Range Regulation of Human FXN Gene Expression, PLOS ONE, 2011; the contents of which is herein incorporated by reference in its entirety).

[0098] In one embodiment, the promoter is less than 1 kb. The promoter may have a length of 200, 210, 220, 230, 240, 250, 260, 270, 280, 290, 300, 310, 320, 330, 340, 350, 360, 370, 380, 390, 400, 410, 420, 430, 440, 450, 460, 470, 480, 490, 500, 510, 520, 530, 540, 550, 560, 570, 580, 590, 600, 610, 620, 630, 640, 650, 660, 670, 680, 690, 700, 710, 720, 730, 740, 750, 760, 770, 780, 790, 800 or more than 800. The promoter may have a length between 200-300, 200-400, 200-500, 200-600, 200-700, 200-800, 300-400, 300-500, 300-600, 300-700, 300-800, 400-500, 400-600, 400-700, 400-800, 500-600, 500-700, 500-800, 600-700, 600-800 or 700-800.

[0099] In one embodiment, the promoter may be a combination of two or more components, regions or sequences of the same or different promoters such as, but not limited to, CMV and CBA. Each component may have a length of 200, 210, 220, 230, 240, 250, 260, 270, 280, 290, 300, 310, 320, 330, 340, 350, 360, 370, 380, 381, 382, 383, 384, 385, 386, 387, 388, 389, 390, 400, 410, 420, 430, 440, 450, 460, 470, 480, 490, 500, 510, 520, 530, 540, 550, 560, 570, 580, 590, 600, 610, 620, 630, 640, 650, 660, 670, 680, 690, 700, 710, 720, 730, 740, 750, 760, 770, 780, 790, 800 or more than 800. Each component may have a length between 200-300, 200-400, 200-500, 200-600, 200-700, 200-800, 300-400, 300-500, 300-600, 300-700, 300-800, 400-500, 400-600, 400-700, 400-800, 500-600, 500-700, 500-800, 600-700, 600-800 or 700-800.

[0100] In one embodiment, the promoter is a combination of a 382 nucleotide CMV-enhancer sequence and a 260 nucleotide CBA-promoter sequence.

[0101] In one embodiment, the viral genome comprises a ubiquitous promoter. Non-limiting examples of ubiquitous promoters include CMV, CBA (including derivatives CAG, CBh, etc.), EF-1α, PGK, UBC, GUSB (hGBp), and UCOE (promoter of HNRPA2B1-CBX3).

[0102] In one embodiment, any of the promoters taught by Yu, Soderblom, Gill, Husain, Passini, Xu, Drews or Raymond may be used in the present inventions. Yu et al. (Molecular Pain 2011, 7:63; the contents of which are herein incorporated by reference in its entirety) evaluated the expression of eGFP under the CAG, EFIα, PGK and UBC promoters in rat DRG cells and primary DRG cells using lentiviral vectors and found that UBC showed weaker expression than the other 3 promoters and there was only 10-12% glia expression seen for all promoters. Soderblom et al. (E. Neuro 2015; the contents of which are herein incorporated by reference in its entirety) evaluated the expression of eGFP in AAV8 with CMV and UBC promoters and AAV2 with the CMV promoter after injection in the motor cortex. Intranasal administration of a plasmid containing a UBC or EFIa promoter showed a sustained airway expression greater than the expression with the CMV promoter (See e.g., Gill et al., Gene Therapy 2001, Vol. 8, 1539-1546; the contents of which are herein incorporated by reference in its entirety). Husain et al. (Gene Therapy 2009; the contents of which are herein incorporated by reference in its entirety) evaluated a HβH construct with a hGUSB promoter, a HSV-1LAT promoter and a NSE promoter and found that the HβH construct showed weaker expression than NSE in mice brain. Passini and Wolfe (J. Virol. 2001, 12382-12392, the contents of which are herein incorporated by reference in its entirety) evaluated the long term effects of the HβH vector following an intraventricular injection in neonatal mice and found that there was sustained expression for at least 1 year. Low expression in all brain regions was found by Xu et al. (Gene Therapy 2001, 8, 1323-1332; the contents of which are herein incorporated by reference in its entirety) when NF-L and NF-H promoters were used as compared to the CMV-lacZ, CMV-luc, EF, GFAP, hENK, nAChR, PPE, PPE+wpre, NSE (0.3 kb), NSE (1.8 kb) and NSE (1.8 kb+wpre). Xu et al. found that the promoter activity in descending order was NSE (1.8 kb), EF, NSE (0.3 kb), GFAP, CMV, hENK, PPE, NFL and NFH. NFL is a 650 nucleotide promoter and NFH is a 920 nucleotide promoter which are both absent in the liver but NFH is abundant in the sensory proprioceptive neurons, brain and spinal cord and NFH is present in the heart. SCN8A is a 470 nucleotide promoter which expresses throughout the DRG, spinal cord and brain with particularly high expression seen in the hippocampal neurons and cerebellar Purkinje cells, cortex, thalamus and hypothalamus (See e.g., Drews et al. Identification of evolutionary conserved, functional noncoding elements in the promoter region of the sodium channel gene SCN8A, Mamm Genome (2007) 18:723-731; and Raymond et al. Expression of Alternatively Spliced Sodium Channel α-subunit genes, Journal of Biological Chemistry (2004) 279(44) 46234-46241; the contents of each of which are herein incorporated by reference in their entireties).

[0103] In one embodiment, the viral genome comprises a promoter which is not cell specific.

[0104] In one embodiment, the promoter is a weak promoter (classified according to its affinity and other promoters affinity for RNA polymerase and/or sigma factor) for sustained expression of a payload in nervous tissues. In one embodiment, the promoter is a weak promoter for sustained frataxin expression in nervous system tissue such as, but not limited to, neuronal tissue and glial tissue.

[0105] In one embodiment, the Friedreich's Ataxia (FRDA) promoter is used in the viral genomes of the AAV particles described herein.

[0106] In one embodiment, the viral genome comprises an ubiquitin c (UBC) promoter. The UBC promoter may have a size of 300-350 nucleotides. As a non-limiting example, the UBC promoter is 332 nucleotides.

[0107] In one embodiment, the viral genome comprises a β-glucuronidase (GUSB) promoter. The GUSB promoter may have a size of 350-400 nucleotides. As a non-limiting example, the GUSB promoter is 378 nucleotides. As a non-limiting example, the viral genome may be 5′-promoter-CMV/globin intron-hFXN-RBG-3′, where the viral genome may be self-complementary and the capsid may be the DJ serotype.

[0108] In one embodiment, the viral genome comprises a neurofilament (NFL) promoter. The NFL promoter may have a size of 600-700 nucleotides. As a non-limiting example, the NFL promoter is 650 nucleotides. As a non-limiting example, the viral genome may be 5′-promoter-CMV/globin intron-hFXN-RBG-3, where the viral genome may be self-complementary and the capsid may be the DJ serotype.

[0109] In one embodiment, the viral genome comprises a neurofilament heavy (NFH) promoter. The NFH promoter may have a size of 900-950 nucleotides. As a non-limiting example, the NFH promoter is 920 nucleotides. As a non-limiting example, the viral genome may be 5′-promoter-CMV/globin intron-hFXN-RBG-3′, where the viral genome may be self-complementary and the capsid may be the DJ serotype.

[0110] In one embodiment, the viral genome comprises a SCN8A promoter. The SCN8A promoter may have a size of 450-500 nucleotides. As a non-limiting example, the SCN8A promoter is 470 nucleotides. As a non-limiting example, the viral genome may be d′-promoter-CMV/globin intron-hFXN-RBG-3, where the viral genome may be self-complementary and the capsid may be the DJ serotype.

[0111] In one embodiment, the viral genome comprises a frataxin (FXN) promoter.

[0112] In one embodiment, the viral genome comprises a phosphoglycerate kinase 1 (PGK) promoter.

[0113] In one embodiment, the viral genome comprises a chicken β-actin (CBA) promoter.

[0114] In one embodiment, the viral genome comprises an immediate-early cytomegalovirus (CMV) promoter.

[0115] In one embodiment, the viral genome comprises a H1 promoter.

[0116] In one embodiment, the viral genome comprises a U6 promoter.

[0117] In one embodiment, the viral genome comprises a liver or a skeletal muscle promoter. Non-limiting examples of liver promoters include hAAT and TBG. Non-limiting examples of skeletal muscle promoters include Desmin, MCK and C5-12.

[0118] In one embodiment, the viral genome comprises a liver or a skeletal muscle promoter. Non-limiting examples of liver promoters include hAAT and TBG. Non-limiting examples of skeletal muscle promoters include Desmin, MCK and C5-12.

[0119] In one embodiment, the viral genome comprises an engineered promoter.

### Enhancement Element

[0120] In one embodiment, the viral genome may comprise at least one an enhancer and/or expression element. The enhancer or expression element may be used in combination with a regulatory sequence.

[0121] In one embodiment, the viral genome comprises an transgene enhancer, a promoter and/or a 5′UTR intron. The transgene enhancer, also referred to herein as an “enhancer,” may be, but is not limited to, a CMV enhancer. The promoter may be, but is not limited to, a CMV, CBA, UBC, GUSB, NSE, Synapsin, MeCP2, and GFAP promoter. The 5′UTR/intron may be, but is not limited to, SV40, and CBA-MVM.

[0122] In one embodiment, the viral genome comprises an transgene enhancer, a promoter and/or an intron combination such as, but not limited to, (1) CMV enhancer, CMV promoter, SV40 5′UTR intron; (2) CMV enhancer, CBA promoter, SV 40 5′UTR intron; (3) CMV enhancer, CBA promoter, CBA-MVM 5′UTR intron.

### Transgene Enhancement

[0123] In one embodiment, the viral genome comprises at least one transgene enhancer element which can enhance the transgene target specificity and expression (See e.g., Powell et al. Viral Expression Cassette Elements to Enhance Transgene Target Specificity and Expression in Gene Therapy, 2015; the contents of which are herein incorporated by reference in its entirety). Non-limiting examples of transgene enhancer elements to enhance the transgene target specificity and expression include promoters, endogenous miRNAs, post-transcriptional regulatory elements (PREs), polyadenylation (PolyA) signal sequences and upstream enhancers (USEs), CMV enhancers and introns.

[0124] In one embodiment, the viral genome comprises at least one transgene enhancer element which is a CMV enhancer.

[0125] In one embodiment, the viral genome comprises at least one transgene enhancer element which is a promoter.

[0126] In one embodiment, the viral genome comprises at least one transgene enhancer element which is an intron.

[0127] In one embodiment, the viral genome comprises at least one transgene enhancer element which is endogenous miRNAs.

[0128] In one embodiment, the viral genome comprises at least one transgene enhancer element which is post-transcriptional regulatory elements (PREs).

[0129] In one embodiment, the viral genome comprises at least one transgene enhancer element which is polyadenylation (PolyA) signal sequences.

[0130] In one embodiment, the viral genome comprises at least one transgene enhancer element which is upstream enhancers (USEs).

### Tissue-Specific Expression

[0131] In one embodiment, the vector genome may comprise a tissue-specific expression element to promote expression of the payload in tissues and/or cells. As a non-limiting example, promoters can be tissue-specific expression elements include, but are not limited to, human elongation factor 1α-subunit (EF1α), immediate-early cytomegalovirus (CMV), chicken β-actin (CBA) and its derivative CAG, the β glucuronidase (GUSB), and ubiquitin C (UBC).

[0132] In one embodiment, the vector genome may comprise a tissue-specific expression elements which can be used to restrict expression to certain cell types such as, but not limited to, nervous system promoters which can be used to restrict expression to neurons, astrocytes, or oligodendrocytes.

[0133] In one embodiment, the vector genome may comprise a tissue-specific expression elements for neurons such as, but not limited to, neuron-specific enolase (NSE), platelet-derived growth factor (PDGF), platelet-derived growth factor B-chain (PDGF-β), the synapsin (Syn), the methyl-CpG binding protein 2 (MeCP2), Ca²⁺/calmodulin-dependent protein kinase II (CaMKII), metabotropic glutamate receptor 2 (mGluR2), NFL, NFH, np32, PPE, Enk and EAAT2 promoters.

[0134] In one embodiment, the vector genome may comprise a tissue-specific expression elements for astrocytes such as, but not limited to, the glial fibrillary acidic protein (GFAP) and EAAT2 promoters.

[0135] In one embodiment, the vector genome may comprise a tissue-specific expression elements for oligodendrocytes such as, but not limited to, the myelin basic protein (MBP) promoter.

### Introns

[0136] In one embodiment, the viral genome comprises at least one element to enhance the transgene expression such as one or more introns or portions thereof.

[0137] In one embodiment, the payload construct comprises at least one element to enhance the transgene expression such as one or more introns or portions thereof.

[0138] Non-limiting examples of introns include, MVM (67-97 bps), F.IX truncated intron 1 (300 bps), β-globin SD/immunoglobulin heavy chain splice acceptor (250 bps), adenovirus splice donor/immunoglobin splice acceptor (500 bps), SV40 late splice donor/splice acceptor (19S/16S) (180 bps) and hybrid adenovirus splice donor/IgG splice acceptor (230 bps).

[0139] In one embodiment, the intron or intron portion may be 100-500 nucleotides in length. The intron may have a length of 80, 90, 100, 110, 120, 130, 140, 150, 160, 170, 171, 172, 173, 174, 175, 176, 177, 178, 179, 180, 190, 200, 210, 220, 230, 240, 250, 260, 270, 280, 290, 300, 310, 320, 330, 340, 350, 360, 370, 380, 390, 400, 410, 420, 430, 440, 450, 460, 470, 480, 490 or 500. The intron may have a length between 80-100, 80-120, 80-140, 80-160, 80-180, 80-200, 80-250, 80-300, 80-350, 80-400, 80-450, 80-500, 200-300, 200-400, 200-500, 300-400, 300-500, or 400-500.

### Capsids and Capsid Serotypes

[0140] In some embodiments, AAV particles of the present invention may be packaged in a capsid structure or may be capsid free. Such capsid free viral vector donor and/or acceptor sequences such as AAV, are described in, for example, US Publication 20140107186, the content of which is incorporated by reference in its entirety.

[0141] In one embodiment, the present invention, provides nucleic acids encoding the mutated or modified virus capsids and capsid proteins of the invention. In some embodiments the capsids are engineered according to the methods of co-owned and co-pending International Publication No. WO2015191508, the contents of which are herein incorporated by reference in their entirety.

[0142] In some embodiments, AAV particles produced according to the present invention may comprise hybrid serotypes with enhanced transduction to specific cell types of interest in the central nervous system, prolonged transgene expression and/or a safety profile. The hybrid serotypes may be generated by transcapsidation, adsorption of bi-specific antibody to capsid surface, mosaic capsid, and chimeric capsid, and/or other capsid protein modifications.

[0143] In some embodiments, AAV particles of the present invention may be further modified toward a specific therapeutic application by rational mutagenesis of capsid proteins (see, e.g., Pulicherla et al., Mol Ther, 2011, 19: 1070-1078), incorporation of peptide ligands to the capsid, for example a peptide derived from an NMDA receptor agonist for enhanced retrograde transport (Xu et al., Virology, 2005, 341: 203-214), and directed evolution to produce new AAV variants for increased CNS transduction.

[0144] In some embodiments, AAV particles produced according to the present invention may comprise different capsid proteins, either naturally occurring and/or recombinant, including, but not limited to, AAV1, AAV2, AAV3, AAV4, AAV5, AAV6, AAV7, AAV8, AAV9, AAV10, and AAV11, AAV12, AAVrh8, AAVrh10, AAV-DJ, and AAV-DJ/8 capsid serotypes, or variants thereof (e.g., AAV3A and AAV3B). Nucleic acid sequences encoding one or more AAV capsid proteins useful in the present invention are disclosed in the commonly owned International Publication No. WO2015191508, the contents of which are herein incorporated by reference in their entirety.

[0145] In some embodiments, AAV particles of the present invention may comprise or be derived from any natural or recombinant AAV serotype. According to the present invention, the AAV particles may utilize or be based on a serotype selected from any of the following AAV1, AAV2, AAV2G9, AAV3, AAV3a, AAV3b, AAV3-3, AAV4, AAV4-4, AAV5, AAV6, AAV6.1, AAV6.2, AAV6.1.2, AAV7, AAV7.2, AAV8, AAV9, AAV9.11, AAV9.13, AAV9.16, AAV9.24, AAV9.45, AAV9.47, AAV9.61, AAV9.68, AAV9.84, AAV9.9, AAV10, AAV11, AAV12, AAV16.3, AAV24.1, AAV27.3, AAV42.12, AAV42-1b, AAV42-2, AAV42-3a, AAV42-3b, AAV42-4, AAV42-5a, AAV42-5b, AAV42-6b, AAV42-8, AAV42-10, AAV42-11, AAV42-12, AAV42-13, AAV42-15, AAV42-aa, AAV43-1, AAV43-12, AAV43-20, AAV43-21, AAV43-23, AAV43-25, AAV43-5, AAV44.1, AAV44.2, AAV44.5, AAV223.1, AAV223.2, AAV223.4, AAV223.5, AAV223.6, AAV223.7, AAV1-7/rh.48, AAV1-8/rh.49, AAV2-15/rh.62, AAV2-3/rh.61, AAV2-4/rh.50, AAV2-5/rh.51, AAV3.1/hu.6, AAV3.1/hu.9, AAV3-9/rh.52, AAV3-11/rh.53, AAV4-8/r11.64, AAV4-9/rh.54, AAV4-19/rh.55, AAV5-3/rh.57, AAV5-22/rh.58, AAV7.3/hu.7, AAV16.8/hu.10, AAV16.12/hu.11, AAV29.3/bb.1, AAV29.5/bb.2, AAV106.1/hu.37, AAV114.3/hu.40, AAV127.2/hu.41, AAV127.5/hu.42, AAV128.3/hu.44, AAV130.4/hu.48, AAV145.1/hu.53, AAV145.5/hu.54, AAV145.6/hu.55, AAV161.10/hu.60, AAV161.6/hu.61, AAV33.12/hu.17, AAV33.4/hu.15, AAV33.8/hu.16, AAV52/hu.19, AAV52.1/hu.20, AAV58.2/hu.25, AAVA3.3, AAVA3.4, AAVA3.5, AAVA3.7, AAVC1, AAVC2, AAVC5, AAV-DJ, AAV-DJ8, AAVF3, AAVF5, AAVH2, AAVrh.72, AAVhu.8, AAVrh.68, AAVrh.70, AAVpi.1, AAVpi.3, AAVpi.2, AAVrh.60, AAVrh.44, AAVrh.65, AAVrh.55, AAVrh.47, AAVrh.69, AAVrh.45, AAVrh.59, AAVhu.12, AAVH6, AAVLK03, AAVH-1/hu.1, AAVH-5/hu.3, AAVLG-10/rh.40, AAVLG-4/rh.38, AAVLG-9/hu.39, AAVN721-8/rh.43, AAVCh.5, AAVCh.5R1, AAVcy.2, AAVcy.3, AAVcy.4, AAVcy.5, AAVCy.5R1, AAVCy.5R2, AAVCy.5R3, AAVCy.5R4, AAVcy.6, AAVhu.1, AAVhu.2, AAVhu.3, AAVhu.4, AAVhu.5, AAVhu.6, AAVhu.7, AAVhu.9, AAVhu.10, AAVhu.11, AAVhu.13, AAVhu.15, AAVhu.16, AAVhu.17, AAVhu.18, AAVhu.20, AAVhu.21, AAVhu.22, AAVhu.23.2, AAVhu.24, AAVhu.25, AAVhu.27, AAVhu.28, AAVhu.29, AAVhu.29R, AAVhu.31, AAVhu.32, AAVhu.34, AAVhu.35, AAVhu.37, AAVhu.39, AAVhu.40, AAVhu.41, AAVhu.42, AAVhu.43, AAVhu.44, AAVhu.44R1, AAVhu.44R2, AAVhu.44R3, AAVhu.45, AAVhu.46, AAVhu.47, AAVhu.48, AAVhu.48R1, AAVhu.48R2, AAVhu.48R3, AAVhu.49, AAVhu.51, AAVhu.52, AAVhu.54, AAVhu.55, AAVhu.56, AAVhu.57, AAVhu.58, AAVhu.60, AAVhu.61, AAVhu.63, AAVhu.64, AAVhu.66, AAVhu.67, AAVhu.14/9, AAVhu.t 19, AAVrh.2, AAVrh.2R, AAVrh.8, AAVrh.8R, AAVrh.10, AAVrh.12, AAVrh.13, AAVrh.13R, AAVrh.14, AAVrh.17, AAVrh.18, AAVrh.19, AAVrh.20, AAVrh.21, AAVrh.22, AAVrh.23, AAVrh.24, AAVrh.25, AAVrh.31, AAVrh.32, AAVrh.33, AAVrh.34, AAVrh.35, AAVrh.36, AAVrh.37, AAVrh.37R2, AAVrh.38, AAVrh.39, AAVrh.40, AAVrh.46, AAVrh.48, AAVrh.48.1, AAVrh.48.1.2, AAVrh.48.2, AAVrh.49, AAVrh.51, AAVrh.52, AAVrh.53, AAVrh.54, AAVrh.56, AAVrh.57, AAVrh.58, AAVrh.61, AAVrh.64, AAVrh.64R1, AAVrh.64R2, AAVrh.67, AAVrh.73, AAVrh.74, AAVrh8R, AAVrh8R A586R mutant, AAVrh8R R533A mutant, AAAV, BAAV, caprine AAV, bovine AAV, AAVhE1.1, AAVhEr1.5, AAVhER1.14, AAVhEr1.8, AAVhEr1.16, AAVhEr1.18, AAVhEr1.35, AAVhEr1.7, AAVhEr1.36, AAVhEr2.29, AAVhEr2.4, AAVhEr2.16, AAVhEr2.30, AAVhEr2.31, AAVhEr2.36, AAVhER1.23, AAVhEr3.1, AAV2.5T, AAV-PAEC, AAV-LK01, AAV-LK02, AAV-LK03, AAV-LK04, AAV-LK05, AAV-LK06, AAV-LK07, AAV-LK08, AAV-LK09, AAV-LK10, AAV-LK11, AAV-LK12, AAV-LK13, AAV-LK14, AAV-LK15, AAV-LK16, AAV-LK17, AAV-LK18, AAV-LK19, AAV-PAEC2, AAV-PAEC4, AAV-PAEC6, AAV-PAEC7, AAV-PAEC8, AAV-PAEC11, AAV-PAEC12, AAV-2-pre-miRNA-101, AAV-8h, AAV-8b, AAV-h, AAV-b, AAV SM 10-2, AAV Shuffle 100-1, AAV Shuffle 100-3, AAV Shuffle 100-7, AAV Shuffle 10-2, AAV Shuffle 10-6, AAV Shuffle 10-8, AAV Shuffle 100-2, AAV SM 10-1, AAV SM 10-8, AAV SM 100-3, AAV SM 100-10, BNP61 AAV, BNP62 AAV, BNP63 AAV, AAVrh.50, AAVrh.43, AAVrh.62, AAVrh.48, AAVhu.19, AAVhu.11, AAVhu.53, AAV4-8/rh.64, AAVLG-9/hu.39, AAV54.5/hu.23, AAV54.2/hu.22, AAV54.7/hu.24, AAV54.1/hu.21, AAV54.4R/hu.27, AAV46.2/hu.28, AAV46.6/hu.29, AAV128.1/hu.43, true type AAV (ttAAV), UPENN AAV 10 and/or Japanese AAV 10 serotypes, and variants thereof. As a non-limiting example, the capsid of the recombinant AAV virus is AAV2. As a non-limiting example, the capsid of the recombinant AAV virus is AAVrh10. As a non-limiting example, the capsid of the recombinant AAV virus is AAV9(hu14). As a non-limiting example, the capsid of the recombinant AAV virus is AAV-DJ. As a non-limiting example, the capsid of the recombinant AAV virus is AAV9.47. As a non-limiting example, the capsid of the recombinant AAV virus is AAV-DJ8.

[0146] In some embodiments, the AAV particles of the present invention may comprise or be derived from an AAV serotype which may be, or have, a sequence as described in United States Publication No. US20030138772, the contents of which are herein incorporated by reference in their entirety, such as, but not limited to, AAV1 (SEQ ID NO: 6 and 64 of US20030138772), AAV2 (SEQ ID NO: 7 and 70 of US20030138772), AAV3 (SEQ ID NO: 8 and 71 of US20030138772), AAV4 (SEQ ID NO: 63 of US20030138772), AAV5 (SEQ ID NO: 114 of US20030138772), AAV6 (SEQ ID NO: 65 of US20030138772), AAV7 (SEQ ID NO: 1-3 of US20030138772), AAV8 (SEQ ID NO: 4 and 95 of US20030138772), AAV9 (SEQ ID NO: 5 and 100 of US20030138772), AAV10 (SEQ ID NO: 117 of US20030138772), AAV11 (SEQ ID NO: 118 of US20030138772), AAV12 (SEQ ID NO: 119 of US20030138772), AAVrh10 (amino acids 1 to 738 of SEQ ID NO: 81 of US20030138772), AAV16.3 (US20030138772 SEQ ID NO: 10), AAV29.3/bb.1 (US20030138772 SEQ ID NO: 11), AAV29.4 (US20030138772 SEQ ID NO: 12), AAV29.5/bb.2 (US20030138772 SEQ ID NO: 13), AAV1.3 (US20030138772 SEQ ID NO: 14), AAV13.3 (US20030138772 SEQ ID NO: 15), AAV24.1 (US20030138772 SEQ ID NO: 16), AAV27.3 (US20030138772 SEQ ID NO: 17), AAV7.2 (US20030138772 SEQ ID NO: 18), AAVC1 (US20030138772 SEQ ID NO: 19), AAVC3 (US20030138772 SEQ ID NO: 20), AAVC5 (US20030138772 SEQ ID NO: 21), AAVF1 (US20030138772 SEQ ID NO: 22), AAVF3 (US20030138772 SEQ ID NO: 23), AAVF5 (US20030138772 SEQ ID NO: 24), AAVH6 (US20030138772 SEQ ID NO: 25), AAVH2 (US20030138772 SEQ ID NO: 26), AAV42-8 (US20030138772 SEQ ID NO: 27), AAV42-15 (US20030138772 SEQ ID NO: 28), AAV42-5b (US20030138772 SEQ ID NO: 29), AAV42-1b (US20030138772 SEQ ID NO: 30), AAV42-13 (US20030138772 SEQ ID NO: 31), AAV42-3a (US20030138772 SEQ ID NO: 32), AAV42-4 (US20030138772 SEQ ID NO: 33), AAV42-5a (US20030138772 SEQ ID NO: 34), AAV42-10 (US20030138772 SEQ ID NO: 35), AAV42-3b (US20030138772 SEQ ID NO: 36), AAV42-11 (US20030138772 SEQ ID NO: 37), AAV42-6b (US20030138772 SEQ ID NO: 38), AAV43-1 (US20030138772 SEQ ID NO: 39), AAV43-5 (US20030138772 SEQ ID NO: 40), AAV43-12 (US20030138772 SEQ ID NO: 41), AAV43-20 (US20030138772 SEQ ID NO: 42), AAV43-21 (US20030138772 SEQ ID NO: 43), AAV43-23 (US20030138772 SEQ ID NO: 44), AAV43-25 (US20030138772 SEQ ID NO: 45), AAV44.1 (US20030138772 SEQ ID NO: 46), AAV44.5 (US20030138772 SEQ ID NO: 47), AAV223.1 (US20030138772 SEQ ID NO: 48), AAV223.2 (US20030138772 SEQ ID NO: 49), AAV223.4 (US20030138772 SEQ ID NO: 50), AAV223.5 (US20030138772 SEQ ID NO: 51), AAV223.6 (US20030138772 SEQ ID NO: 52), AAV223.7 (US20030138772 SEQ ID NO: 53), AAVA3.4 (US20030138772 SEQ ID NO: 54), AAVA3.5 (US20030138772 SEQ ID NO: 55), AAVA3.7 (US20030138772 SEQ ID NO: 56), AAVA3.3 (US20030138772 SEQ ID NO: 57), AAV42.12 (US20030138772 SEQ ID NO: 58), AAV44.2 (US20030138772 SEQ ID NO: 59), AAV42-2 (US20030138772 SEQ ID NO: 9), or variants thereof.

[0147] In some embodiments, the AAV particles of the present invention may comprise or be derived from AAV serotype which may be, or have, a sequence as described in United States Publication No. US20150159173, the contents of which are herein incorporated by reference in their entirety, such as, but not limited to, AAV2 (SEQ ID NO: 7 and 23 of US20150159173), rh20 (SEQ ID NO: 1 of US20150159173), rh32/33 (SEQ ID NO: 2 of US20150159173), rh39 (SEQ ID NO: 3, 20 and 36 of US20150159173), rh46 (SEQ ID NO: 4 and 22 of US20150159173), rh73 (SEQ ID NO: 5 of US20150159173), rh74 (SEQ ID NO: 6 of US20150159173), AAV6.1 (SEQ ID NO: 29 of US20150159173), rh.8 (SEQ ID NO: 41 of US20150159173), rh.48.1 (SEQ ID NO: 44 of US20150159173), hu.44 (SEQ ID NO: 45 of US20150159173), hu.29 (SEQ ID NO: 42 of US20150159173), hu.48 (SEQ ID NO: 38 of US20150159173), rh54 (SEQ ID NO: 49 of US20150159173), AAV2 (SEQ ID NO: 7 of US20150159173), cy.5 (SEQ ID NO: 8 and 24 of US20150159173), rh.10 (SEQ ID NO: 9 and 25 of US20150159173), rh.13 (SEQ ID NO: 10 and 26 of US20150159173), AAV1 (SEQ ID NO: 11 and 27 of US20150159173), AAV3 (SEQ ID NO: 12 and 28 of US20150159173), AAV6 (SEQ ID NO: 13 and 29 of US20150159173), AAV7 (SEQ ID NO: 14 and 30 of US20150159173), AAV8 (SEQ ID NO: 15 and 31 of US20150159173), hu.13 (SEQ ID NO: 16 and 32 of US20150159173), hu.26 (SEQ ID NO: 17 and 33 of US20150159173), hu.37 (SEQ ID NO: 18 and 34 of US20150159173), hu.53 (SEQ ID NO: 19 and 35 of US20150159173), rh.43 (SEQ ID NO: 21 and 37 of US20150159173), rh2 (SEQ ID NO: 39 of US20150159173), rh.37 (SEQ ID NO: 40 of US20150159173), rh.64 (SEQ ID NO: 43 of US20150159173), rh.48 (SEQ ID NO: 44 of US20150159173), ch.5 (SEQ ID NO 46 of US20150159173), rh.67 (SEQ ID NO: 47 of US20150159173), rh.58 (SEQ ID NO: 48 of US20150159173), or variants thereof including, but not limited to Cy5R1, Cy5R2, Cy5R3, Cy5R4, rh.13R, rh.37R2, rh.2R, rh.8R, rh.48.1, rh.48.2, rh.48.1.2, hu.44R1, hu.44R2, hu.44R3, hu.29R, ch.5R1, rh64R1, rh64R2, AAV6.2, AAV6.1, AAV6.12, hu.48R1, hu.48R2, and hu.48R3.

[0148] In some embodiments, the AAV particles of the present invention may comprise or be derived from AAV serotype which may be, or have, a sequence as described in U.S. Pat. No. 7,198,951, the contents of which are herein incorporated by reference in their entirety, such as, but not limited to, AAV9 (SEQ ID NO: 1-3 of U.S. Pat. No. 7,198,951), AAV2 (SEQ ID NO: 4 of U.S. Pat. No. 7,198,951), AAV1 (SEQ ID NO: 5 of U.S. Pat. No. 7,198,951), AAV3 (SEQ ID NO: 6 of U.S. Pat. No. 7,198,951), and AAV8 (SEQ ID NO: 7 of U.S. Pat. No. 7,198,951).

[0149] In some embodiments, the AAV particles of the present invention may comprise or be derived from AAV serotype which may be, or have, a mutation in the AAV9 sequence as described by N Pulicherla et al. (Molecular Therapy 19(6): 1070-1078 (2011), herein incorporated by reference in its entirety), such as but not limited to, AAV9.9, AAV9.11, AAV9.13, AAV9.16, AAV9.24, AAV9.45, AAV9.47, AAV9.61, AAV9.68, AAV9.84.

[0150] In some embodiments, the AAV particles of the present invention may comprise or be derived from AAV serotype which may be, or have, a sequence as described in U.S. Pat. No. 6,156,303, the contents of which are herein incorporated by reference in their entirety, such as, but not limited to, AAV3B (SEQ ID NO: 1 and 10 of U.S. Pat. No. 6,156,303), AAV6 (SEQ ID NO: 2, 7 and 11 of U.S. Pat. No. 6,156,303), AAV2 (SEQ ID NO: 3 and 8 of U.S. Pat. No. 6,156,303), AAV3A (SEQ ID NO: 4 and 9, of U.S. Pat. No. 6,156,303), or derivatives thereof.

[0151] In some embodiments, the AAV particles of the present invention may comprise or be derived from AAV serotype which may be, or have, a sequence as described in United States Publication No. US20140359799, the contents of which are herein incorporated by reference in their entirety, such as, but not limited to, AAV8 (SEQ ID NO: 1 of US20140359799), AAVDJ (SEQ ID NO: 2 and 3 of US20140359799), or variants thereof.

[0152] In some embodiments, the AAV particle may comprise a capsid from a serotype such as, but not limited to, AAVDJ or a variant thereof, such as AAVDJ8 (or AAV-DJ8), as described by Grimm et al. (Journal of Virology 82(12): 5887-5911 (2008), herein incorporated by reference in its entirety). The amino acid sequence of AAVDJ8 may comprise two or more mutations in order to remove the heparin binding domain (HBD). As a non-limiting example, the AAV-DJ sequence described as SEQ ID NO: 1 in U.S. Pat. No. 7,588,772, the contents of which are herein incorporated by reference in their entirety, may comprise two mutations: (1) R587Q where arginine (R; Arg) at amino acid 587 is changed to glutamine (Q; Gln) and (2) R590T where arginine (R; Arg) at amino acid 590 is changed to threonine (T; Thr). As another non-limiting example, may comprise three mutations: (1) K406R where lysine (K; Lys) at amino acid 406 is changed to arginine (R; Arg), (2) R587Q where arginine (R; Arg) at amino acid 587 is changed to glutamine (Q; Gln) and (3) R590T where arginine (R; Arg) at amino acid 590 is changed to threonine (T; Thr).

[0153] In some embodiments, the AAV particles of the present invention may comprise or be derived from AAV serotype which may be, or have, a sequence of AAV4 as described in International Publication No. WO1998011244, the contents of which are herein incorporated by reference in their entirety, such as, but not limited to AAV4 (SEQ ID NO: 1-20 of WO1998011244).

[0154] In some embodiments, the AAV particles of the present invention may comprise or be derived from AAV serotype which may be, or have, a mutation in the AAV2 sequence to generate AAV2G9 as described in International Publication No. WO2014144229 and herein incorporated by reference in its entirety.

[0155] In some embodiments, the AAV particles of the present invention may comprise or be derived from AAV serotype which may be, or have, a sequence as described in International Publication No. WO2005033321, the contents of which are herein incorporated by reference in their entirety, such as, but not limited to AAV3-3 (SEQ ID NO: 217 of WO2005033321), AAV1 (SEQ ID NO: 219 and 202 of WO2005033321), AAV106.1/hu.37 (SEQ ID No: 10 of WO2005033321), AAV114.3/hu.40 (SEQ ID No: 11 of WO2005033321), AAV127.2/hu.41 (SEQ ID NO:6 and 8 of WO2005033321), AAV128.3/hu.44 (SEQ ID No: 81 of WO2005033321), AAV130.4/hu.48 (SEQ ID NO: 78 of WO2005033321), AAV145.1/hu.53 (SEQ ID No: 176 and 177 of WO2005033321), AAV145.6/hu.56 (SEQ ID NO: 168 and 192 of WO2005033321), AAV16.12/hu.11 (SEQ ID NO: 153 and 57 of WO2005033321), AAV16.8/hu.10 (SEQ ID NO: 156 and 56 of WO2005033321), AAV161.10/hu.60 (SEQ ID No: 170 of WO2005033321), AAV161.6/hu.61 (SEQ ID No: 174 of WO2005033321), AAV1-7/rh.48 (SEQ ID NO: 32 of WO2005033321), AAV1-8/rh.49 (SEQ ID NOs: 103 and 25 of WO2005033321), AAV2 (SEQ ID NO: 211 and 221 of WO2005033321), AAV2-15/rh.62 (SEQ ID No: 33 and 114 of WO2005033321), AAV2-3/rh.61 (SEQ ID NO: 21 of WO2005033321), AAV2-4/rh.50 (SEQ ID No: 23 and 108 of WO2005033321), AAV2-5/rh.51 (SEQ ID NO: 104 and 22 of WO2005033321), AAV3.1/hu.6 (SEQ ID NO: 5 and 84 of WO2005033321), AAV3.1/hu.9 (SEQ ID NO: 155 and 58 of WO2005033321), AAV3-11/rh.53 (SEQ ID NO: 186 and 176 of WO2005033321), AAV3-3 (SEQ ID NO: 200 of WO2005033321), AAV33.12/hu.17 (SEQ ID NO:4 of WO2005033321), AAV33.4/hu.15 (SEQ ID No: 50 of WO2005033321), AAV33.8/hu.16 (SEQ ID No: 51 of WO2005033321), AAV3-9/rh.52 (SEQ ID NO: 96 and 18 of WO2005033321), AAV4-19/rh.55 (SEQ ID NO: 117 of WO2005033321), AAV4-4 (SEQ ID NO: 201 and 218 of WO2005033321), AAV4-9/rh.54 (SEQ ID NO: 116 of WO2005033321), AAV5 (SEQ ID NO: 199 and 216 of WO2005033321), AAV52.1/hu.20 (SEQ ID NO: 63 of WO2005033321), AAV52/hu.19 (SEQ ID NO: 133 of WO2005033321), AAV5-22/rh.58 (SEQ ID No: 27 of WO2005033321), AAV5-3/rh.57 (SEQ ID NO: 105 of WO2005033321), AAV5-3/rh.57 (SEQ ID No: 26 of WO2005033321), AAV58.2/hu.25 (SEQ ID No: 49 of WO2005033321), AAV6 (SEQ ID NO: 203 and 220 of WO2005033321), AAV7 (SEQ ID NO: 222 and 213 of WO2005033321), AAV7.3/hu.7 (SEQ ID No: 55 of WO2005033321), AAV8 (SEQ ID NO: 223 and 214 of WO2005033321), AAVH-1/hu.1 (SEQ ID No: 46 of WO2005033321), AAVH-5/hu.3 (SEQ ID No: 44 of WO2005033321), AAVhu.1 (SEQ ID NO: 144 of WO2005033321), AAVhu.10 (SEQ ID NO: 156 of WO2005033321), AAVhu.11 (SEQ ID NO: 153 of WO2005033321), AAVhu.12 (WO2005033321 SEQ ID NO: 59), AAVhu.13 (SEQ ID NO: 129 of WO2005033321), AAVhu.14/AAV9 (SEQ ID NO: 123 and 3 of WO2005033321), AAVhu.15 (SEQ ID NO: 147 of WO2005033321), AAVhu.16 (SEQ ID NO: 148 of WO2005033321), AAVhu.17 (SEQ ID NO: 83 of WO2005033321), AAVhu.18 (SEQ ID NO: 149 of WO2005033321), AAVhu.19 (SEQ ID NO: 133 of WO2005033321), AAVhu.2 (SEQ ID NO: 143 of WO2005033321), AAVhu.20 (SEQ ID NO: 134 of WO2005033321), AAVhu.21 (SEQ ID NO: 135 of WO2005033321), AAVhu.22 (SEQ ID NO: 138 of WO2005033321), AAVhu.23.2 (SEQ ID NO: 137 of WO2005033321), AAVhu.24 (SEQ ID NO: 136 of WO2005033321), AAVhu.25 (SEQ ID NO: 146 of WO2005033321), AAVhu.27 (SEQ ID NO: 140 of WO2005033321), AAVhu.29 (SEQ ID NO: 132 of WO2005033321), AAVhu.3 (SEQ ID NO: 145 of WO2005033321), AAVhu.31 (SEQ ID NO: 121 of WO2005033321), AAVhu.32 (SEQ ID NO: 122 of WO2005033321), AAVhu.34 (SEQ ID NO: 125 of WO2005033321), AAVhu.35 (SEQ ID NO: 164 of WO2005033321), AAVhu.37 (SEQ ID NO: 88 of WO2005033321), AAVhu.39 (SEQ ID NO: 102 of WO2005033321), AAVhu.4 (SEQ ID NO: 141 of WO2005033321), AAVhu.40 (SEQ ID NO: 87 of WO2005033321), AAVhu.41 (SEQ ID NO: 91 of WO2005033321), AAVhu.42 (SEQ ID NO: 85 of WO2005033321), AAVhu.43 (SEQ ID NO: 160 of WO2005033321), AAVhu.44 (SEQ ID NO: 144 of WO2005033321), AAVhu.45 (SEQ ID NO: 127 of WO2005033321), AAVhu.46 (SEQ ID NO: 159 of WO2005033321), AAVhu.47 (SEQ ID NO: 128 of WO2005033321), AAVhu.48 (SEQ ID NO: 157 of WO2005033321), AAVhu.49 (SEQ ID NO: 189 of WO2005033321), AAVhu.51 (SEQ ID NO: 190 of WO2005033321), AAVhu.52 (SEQ ID NO: 191 of WO2005033321), AAVhu.53 (SEQ ID NO: 186 of WO2005033321), AAVhu.54 (SEQ ID NO: 188 of WO2005033321), AAVhu.55 (SEQ ID NO: 187 of WO2005033321), AAVhu.56 (SEQ ID NO: 192 of WO2005033321), AAVhu.57 (SEQ ID NO: 193 of WO2005033321), AAVhu.58 (SEQ ID NO: 194 of WO2005033321), AAVhu.6 (SEQ ID NO: 84 of WO2005033321), AAVhu.60 (SEQ ID NO: 184 of WO2005033321), AAVhu.61 (SEQ ID NO: 185 of WO2005033321), AAVhu.63 (SEQ ID NO: 195 of WO2005033321), AAVhu.64 (SEQ ID NO: 196 of WO2005033321), AAVhu.66 (SEQ ID NO: 197 of WO2005033321), AAVhu.67 (SEQ ID NO: 198 of WO2005033321), AAVhu.7 (SEQ ID NO: 150 of WO2005033321), AAVhu.8 (WO2005033321 SEQ ID NO: 12), AAVhu.9 (SEQ ID NO: 155 of WO2005033321), AAVLG-10/rh.40 (SEQ ID No: 14 of WO2005033321), AAVLG-4/rh.38 (SEQ ID NO: 86 of WO2005033321), AAVLG-4/rh.38 (SEQ ID No: 7 of WO2005033321), AAVN721-8/rh.43 (SEQ ID NO: 163 of WO2005033321), AAVN721-8/rh.43 (SEQ ID No: 43 of WO2005033321), AAVpi.1 (WO2005033321 SEQ ID NO: 28), AAVpi.2 (WO2005033321 SEQ ID NO: 30), AAVpi.3 (WO2005033321 SEQ ID NO: 29), AAVrh.38 (SEQ ID NO: 86 of WO2005033321), AAVrh.40 (SEQ ID NO: 92 of WO2005033321), AAVrh.43 (SEQ ID NO: 163 of WO2005033321), AAVrh.44 (WO2005033321 SEQ ID NO: 34), AAVrh.45 (WO2005033321 SEQ ID NO: 41), AAVrh.47 (WO2005033321 SEQ ID NO: 38), AAVrh.48 (SEQ ID NO: 115 of WO2005033321), AAVrh.49 (SEQ ID NO: 103 of WO2005033321), AAVrh.50 (SEQ ID NO: 108 of WO2005033321), AAVrh.51 (SEQ ID NO: 104 of WO2005033321), AAVrh.52 (SEQ ID NO: 96 of WO2005033321), AAVrh.53 (SEQ ID NO: 97 of WO2005033321), AAVrh.55 (WO2005033321 SEQ ID NO: 37), AAVrh.56 (SEQ ID NO: 152 of WO2005033321), AAVrh.57 (SEQ ID NO: 105 of WO2005033321), AAVrh.58 (SEQ ID NO: 106 of WO2005033321), AAVrh.59 (WO2005033321 SEQ ID NO: 42), AAVrh.60 (WO2005033321 SEQ ID NO: 31), AAVrh.61 (SEQ ID NO: 107 of WO2005033321), AAVrh.62 (SEQ ID NO: 114 of WO2005033321), AAVrh.64 (SEQ ID NO: 99 of WO2005033321), AAVrh.65 (WO2005033321 SEQ ID NO: 35), AAVrh.68 (WO2005033321 SEQ ID NO: 16), AAVrh.69 (WO2005033321 SEQ ID NO: 39), AAVrh.70 (WO2005033321 SEQ ID NO: 20), AAVrh.72 (WO2005033321 SEQ ID NO: 9), or variants thereof including, but not limited to, AAVcy.2, AAVcy.3, AAVcy.4, AAVcy.5, AAVcy.6, AAVrh.12, AAVrh.17, AAVrh.18, AAVrh.19, AAVrh.21, AAVrh.22, AAVrh.23, AAVrh.24, AAVrh.25, AAVrh.25/42 15, AAVrh.31, AAVrh.32, AAVrh.33, AAVrh.34, AAVrh.35, AAVrh.36, AAVrh.37, AAVrh14. Non limiting examples of variants include SEQ ID NO: 13, 15, 17, 19, 24, 36, 40, 45, 47, 48, 51-54, 60-62, 64-77, 79, 80, 82, 89, 90, 93-95, 98, 100, 101, 109-113, 118-120, 124, 126, 131, 139, 142, 151, 154, 158, 161, 162, 165-183, 202, 204-212, 215, 219, 224-236, of WO2005033321, the contents of which are herein incorporated by reference in their entirety.

[0156] In some embodiments, the AAV particles of the present invention may comprise or be derived from AAV serotype which may be, or have, a sequence as described in International Publication No. WO2015168666, the contents of which are herein incorporated by reference in their entirety, such as, but not limited to, AAVrh8R (SEQ ID NO: 9 of WO2015168666), AAVrh8R A586R mutant (SEQ ID NO: 10 of WO2015168666), AAVrh8R R533A mutant (SEQ ID NO: 11 of WO2015168666), or variants thereof.

[0157] In some embodiments, the AAV particles of the present invention may comprise or be derived from AAV serotype which may be, or have, a sequence as described in U.S. Pat. No. 9,233,131, the contents of which are herein incorporated by reference in their entirety, such as, but not limited to, AAVhE1.1 (SEQ ID NO:44 of U.S. Pat. No. 9,233,131), AAVhEr1.5 (SEQ ID NO:45 of U.S. Pat. No. 9,233,131), AAVhER1.14 (SEQ ID NO:46 of U.S. Pat. No. 9,233,131), AAVhEr1.8 (SEQ ID NO:47 of U.S. Pat. No. 9,233,131), AAVhEr1.16 (SEQ ID NO:48 of U.S. Pat. No. 9,233,131), AAVhEr1.18 (SEQ ID NO:49 of U.S. Pat. No. 9,233,131), AAVhEr1.35 (SEQ ID NO:50 of U.S. Pat. No. 9,233,131), AAVhEr1.7 (SEQ ID NO:51 of U.S. Pat. No. 9,233,131), AAVhEr1.36 (SEQ ID NO:52 of U.S. Pat. No. 9,233,131), AAVhEr2.29 (SEQ ID NO:53 of U.S. Pat. No. 9,233,131), AAVhEr2.4 (SEQ ID NO:54 of U.S. Pat. No. 9,233,131), AAVhEr2.16 (SEQ ID NO:55 of U.S. Pat. No. 9,233,131), AAVhEr2.30 (SEQ ID NO:56 of U.S. Pat. No. 9,233,131), AAVhEr2.31 (SEQ ID NO:58 of U.S. Pat. No. 9,233,131), AAVhEr2.36 (SEQ ID NO:57 of U.S. Pat. No. 9,233,131), AAVhER1.23 (SEQ ID NO:53 of U.S. Pat. No. 9,233,131), AAVhEr3.1 (SEQ ID NO:59 of U.S. Pat. No. 9,233,131), AAV2.5T (SEQ ID NO:42 of U.S. Pat. No. 9,233,131), or variants thereof.

[0158] In some embodiments, the AAV particles of the present invention may comprise or be derived from AAV serotype which may be, or have, a sequence as described in United States Patent Publication No. US20150376607, the contents of which are herein incorporated by reference in their entirety, such as, but not limited to, AAV-PAEC (SEQ ID NO:1 of US20150376607), AAV-LK01 (SEQ ID NO:2 of US20150376607), AAV-LK02 (SEQ ID NO:3 of US20150376607), AAV-LK03 (SEQ ID NO:4 of US20150376607), AAV-LK04 (SEQ ID NO:5 of US20150376607), AAV-LK05 (SEQ ID NO:6 of US20150376607), AAV-LK06 (SEQ ID NO:7 of US20150376607), AAV-LK07 (SEQ ID NO:8 of US20150376607), AAV-LK08 (SEQ ID NO:9 of US20150376607), AAV-LK09 (SEQ ID NO:10 of US20150376607), AAV-LK10 (SEQ ID NO:11 of US20150376607), AAV-LK11 (SEQ ID NO: 12 of US20150376607), AAV-LK12 (SEQ ID NO:13 of US20150376607), AAV-LK13 (SEQ ID NO:14 of US20150376607), AAV-LK14 (SEQ ID NO:15 of US20150376607), AAV-LK15 (SEQ ID NO:16 of US20150376607), AAV-LK16 (SEQ ID NO:17 of US20150376607), AAV-LK17 (SEQ ID NO:18 of US20150376607), AAV-LK18 (SEQ ID NO:19 of US20150376607), AAV-LK19 (SEQ ID NO:20 of US20150376607), AAV-PAEC2 (SEQ ID NO:21 of US20150376607), AAV-PAEC4 (SEQ ID NO:22 of US20150376607), AAV-PAEC6 (SEQ ID NO:23 of US20150376607), AAV-PAEC7 (SEQ ID NO:24 of US20150376607), AAV-PAEC8 (SEQ ID NO:25 of US20150376607), AAV-PAEC11 (SEQ ID NO:26 of US20150376607), AAV-PAEC12 (SEQ ID NO:27, of US20150376607), or variants thereof.

[0159] In some embodiments, the AAV particles of the present invention may comprise or be derived from AAV serotype which may be, or have, a sequence as described in U.S. Pat. No. 9,163,261, the contents of which are herein incorporated by reference in their entirety, such as, but not limited to, AAV-2-pre-miRNA-101 (SEQ ID NO: 1 U.S. Pat. No. 9,163,261), or variants thereof.

[0160] In some embodiments, the AAV particles of the present invention may comprise or be derived from AAV serotype which may be, or have, a sequence as described in United States Patent Publication No. US20150376240, the contents of which are herein incorporated by reference in their entirety, such as, but not limited to, AAV-8h (SEQ ID NO: 6 of US20150376240), AAV-8b (SEQ ID NO: 5 of US20150376240), AAV-h (SEQ ID NO: 2 of US20150376240), AAV-b (SEQ ID NO: 1 of US20150376240), or variants thereof.

[0161] In some embodiments, the AAV particles of the present invention may comprise or be derived from AAV serotype which may be, or have, a sequence as described in United States Patent Publication No. US20160017295, the contents of which are herein incorporated by reference in their entirety, such as, but not limited to, AAV SM 10-2 (SEQ ID NO: 22 of US20160017295), AAV Shuffle 100-1 (SEQ ID NO: 23 of US20160017295), AAV Shuffle 100-3 (SEQ ID NO: 24 of US20160017295), AAV Shuffle 100-7 (SEQ ID NO: 25 of US20160017295), AAV Shuffle 10-2 (SEQ ID NO: 34 of US20160017295), AAV Shuffle 10-6 (SEQ ID NO: 35 of US20160017295), AAV Shuffle 10-8 (SEQ ID NO: 36 of US20160017295), AAV Shuffle 100-2 (SEQ ID NO: 37 of US20160017295), AAV SM 10-1 (SEQ ID NO: 38 of US20160017295), AAV SM 10-8 (SEQ ID NO: 39 of US20160017295), AAV SM 100-3 (SEQ ID NO: 40 of US20160017295), AAV SM 100-10 (SEQ ID NO: 41 of US20160017295), or variants thereof.

[0162] In some embodiments, the AAV particles of the present invention may comprise or be derived from AAV serotype which may be, or have, a sequence as described in United States Patent Publication No. US20150238550, the contents of which are herein incorporated by reference in their entirety, such as, but not limited to, BNP61 AAV (SEQ ID NO: 1 of US20150238550), BNP62 AAV (SEQ ID NO: 3 of US20150238550), BNP63 AAV (SEQ ID NO: 4 of US20150238550), or variants thereof.

[0163] In some embodiments, the AAV particles of the present invention may comprise or be derived from an AAV serotype which may be or may have a sequence as described in United States Patent Publication No. US20150315612, the contents of which are herein incorporated by reference in their entirety, such as, but not limited to, AAVrh.50 (SEQ ID NO: 108 of US20150315612), AAVrh.43 (SEQ ID NO: 163 of US20150315612), AAVrh.62 (SEQ ID NO: 114 of US20150315612), AAVrh.48 (SEQ ID NO: 115 of US20150315612), AAVhu.19 (SEQ ID NO: 133 of US20150315612), AAVhu.11 (SEQ ID NO: 153 of US20150315612), AAVhu.53 (SEQ ID NO: 186 of US20150315612), AAV4-8/rh.64 (SEQ ID No: 15 of US20150315612), AAVLG-9/hu.39 (SEQ ID No: 24 of US20150315612), AAV54.5/hu.23 (SEQ ID No: 60 of US20150315612), AAV54.2/hu.22 (SEQ ID No: 67 of US20150315612), AAV54.7/hu.24 (SEQ ID No: 66 of US20150315612), AAV54.1/hu.21 (SEQ ID No: 65 of US20150315612), AAV54.4R/hu.27 (SEQ ID No: 64 of US20150315612), AAV46.2/hu.28 (SEQ ID No: 68 of US20150315612), AAV46.6/hu.29 (SEQ ID No: 69 of US20150315612), AAV128.1/hu.43 (SEQ ID No: 80 of US20150315612), or variants thereof.

[0164] In some embodiments, the AAV particles of the present invention may comprise or be derived from AAV serotype which may be, or have, a sequence as described in International Publication No. WO2015121501, the contents of which are herein incorporated by reference in their entirety, such as, but not limited to, true type AAV (ttAAV) (SEQ ID NO: 2 of WO2015121501), “UPenn AAV10” (SEQ ID NO: 8 of WO2015121501), “Japanese AAV10” (SEQ ID NO: 9 of WO2015121501), or variants thereof.

[0165] According to the present invention, the AAV particle may comprise an AAV capsid serotype which may be selected from or derived from a variety of species. In one embodiment, the AAV may be an avian AAV (AAAV). The AAAV serotype may be, or have, a sequence as described in U.S. Pat. No. 9,238,800, the contents of which are herein incorporated by reference in their entirety, such as, but not limited to, AAAV (SEQ ID NO: 1, 2, 4, 6, 8, 10, 12, and 14 of U.S. Pat. No. 9,238,800), or variants thereof.

[0166] In one embodiment, the AAV particle may comprise an AAV capsid serotype which may be or derived from a bovine AAV (BAAV). The BAAV serotype may be, or have, a sequence as described in U.S. Pat. No. 9,193,769, the contents of which are herein incorporated by reference in their entirety, such as, but not limited to, BAAV (SEQ ID NO: 1 and 6 of U.S. Pat. No. 9,193,769), or variants thereof. The BAAV serotype may be or have a sequence as described in U.S. Pat. No. 7,427,396, the contents of which are herein incorporated by reference in their entirety, such as, but not limited to, BAAV (SEQ ID NO: 5 and 6 of U.S. Pat. No. 7,427,396), or variants thereof.

[0167] In one embodiment, the AAV particle may comprise an AAV capsid serotype which may be or derived from a caprine AAV. The caprine AAV serotype may be, or have, a sequence as described in U.S. Pat. No. 7,427,396, the contents of which are herein incorporated by reference in their entirety, such as, but not limited to, caprine AAV (SEQ ID NO: 3 of US7427396), or variants thereof.

[0168] In other embodiments, the AAV particle may comprise an AAV capsid serotype which may be engineered as a hybrid AAV from two or more parental serotypes. In one embodiment, the AAV may be AAV2G9 which comprises sequences from AAV2 and AAV9. The AAV2G9 AAV serotype may be, or have, a sequence as described in United States Patent Publication No. US20160017005, the contents of which are herein incorporated by reference in its entirety.

[0169] In one embodiment, the AAV particle may comprise an AAV capsid serotype which may be generated by the AAV9 capsid library with mutations in amino acids 390-627 (VP1 numbering) as described by Pulicherla et al. (Molecular Therapy 19(6):1070-1078 (2011), the contents of which are herein incorporated by reference in their entirety. The serotype and corresponding nucleotide and amino acid substitutions may be, but is not limited to, AAV9.1 (G1594C; D532H), AAV6.2 (T1418A and T1436X; V473D and 1479K), AAV9.3 (T1238A; F413Y), AAV9.4 (T1250C and A1617T; F417S), AAV9.5 (A1235G, A1314T, A1642G, C1760T; Q412R, T548A, A587V), AAV9.6 (T1231A; F411I), AAV9.9 (G1203A, G1785T; W595C), AAV9.10 (A1500G, T1676C; M559T), AAV9.11 (A1425T, A1702C, A1769T; T568P, Q590L), AAV9.13 (A1369C, A1720T; N457H, T574S), AAV9.14 (T1340A, T1362C, T1560C, G1713A; L447H), AAV9.16 (A1775T; Q592L), AAV9.24 (T1507C, T1521G; W503R), AAV9.26 (A1337G, A1769C; Y446C, Q590P), AAV9.33 (A1667C; D556A), AAV9.34 (A1534G, C1794T; N512D), AAV9.35 (A1289T, T1450A, C1494T, A1515T, C1794A, G1816A; Q430L, Y484N, N98K, V606I), AAV9.40 (A1694T, E565V), AAV9.41 (A1348T, T1362C; T450S), AAV9.44 (A1684C, A1701T, A1737G; N562H, K567N), AAV9.45 (A1492T, C1804T; N498Y, L602F), AAV9.46 (G1441C, T1525C, T1549G; G481R, W509R, L517V), 9.47 (G1241A, G1358A, A1669G, C1745T; S414N, G453D, K557E, T582I), AAV9.48 (C1445T, A1736T; P482L, Q579L), AAV9.50 (A1638T, C1683T, T1805A; Q546H, L602H), AAV9.53 (G1301A, A1405C, C1664T, G1811T; R134Q, S469R, A555V, G604V), AAV9.54 (C1531A, T1609A; L511I, L537M), AAV9.55 (T1605A; F535L), AAV9.58 (C1475T, C1579A; T492I, H527N), AAV.59 (T1336C; Y446H), AAV9.61 (A1493T; N498I), AAV9.64 (C1531A, A1617T; L511I), AAV9.65 (C1335T, T1530C, C1568A; A523D), AAV9.68 (C1510A; P504T), AAV9.80 (G1441A; G481R), AAV9.83 (C1402A, A1500T; P468T, E500D), AAV9.87 (T1464C, T1468C; S490P), AAV9.90 (A1196T; Y399F), AAV9.91 (T1316G, A1583T, C1782G, T1806C; L439R, K528I), AAV9.93 (A1273G, A1421G, A1638C, C1712T, G1732A, A1744T, A1832T; S425G, Q474R, Q546H, P571L, G578R, T582S, D611V), AAV9.94 (A1675T; M559L) and AAV9.95 (T1605A; F535L).

[0170] In one embodiment, the AAV particle may comprise an AAV capsid serotype which may be a serotype comprising at least one AAV capsid CD8+ T-cell epitope. As a non-limiting example, the serotype may be AAV1, AAV2 or AAV8.

[0171] In one embodiment, the AAV particle may comprise an AAV capsid serotype which may be a serotype selected from any of those found in Table 1.

[0172] In one embodiment, the AAV particle may comprise an AAV capsid serotype which may comprise a sequence, fragment or variant thereof, of the sequences in Table 1.

[0173] In one embodiment, the AAV particle may comprise an AAV capsid serotype which may be encoded by a sequence, fragment or variant as described in Table 1.

TABLE 1
AAV Serotypes

| | SEQ | |
|---|---|---|
| Serotype | ID NO | Reference Information |
| AAV1 | 1 | US20150159173 SEQ ID NO: 11, |
| | | US20150315612 SEQ ID NO: 202 |
| AAV1 | 2 | US20160017295 SEQ ID NO: 1, |
| | | US20030138772 SEQ ID NO: 64, |
| | | US20150159173 SEQ ID NO: 27, |
| | | US20150315612 SEQ ID NO: 219, |
| | | U.S. Pat. No. 7,198,951 SEQ ID NO: 5 |
| AAV1 | 3 | US20030138772 SEQ ID NO: 6 |
| AAV1.3 | 4 | US20030138772 SEQ ID NO: 14 |
| AAV10 | 5 | US20030138772 SEQ ID NO: 117 |
| AAV10 | 6 | WO2015121501 SEQ ID NO: 9 |
| AAV10 | 7 | WO2015121501 SEQ ID NO: 8 |
| AAV11 | 8 | US20030138772 SEQ ID NO: 118 |
| AAV12 | 9 | US20030138772 SEQ ID NO: 119 |
| AAV2 | 10 | US20150159173 SEQ ID NO: 7, |
| | | US20150315612 SEQ ID NO: 211 |
| AAV2 | 11 | US20030138772 SEQ ID NO: 70, |
| | | US20150159173 SEQ ID NO: 23, |
| | | US20150315612 SEQ ID NO: 221, |
| | | US20160017295 SEQ ID NO: 2, |
| | | U.S. Pat. No. 6,156,303 SEQ ID NO: 4, |
| | | U.S. Pat. No. 7,198,951 SEQ ID NO: 4, |
| | | WO2015121501 SEQ ID NO: 1 |
| AAV2 | 12 | U.S. Pat. No. 6,156,303 SEQ ID NO: 8 |
| AAV2 | 13 | US20030138772 SEQ ID NO: 7 |
| AAV2 | 14 | U.S. Pat. No. 6,156,303 SEQ ID NO: 3 |
| AAV2.5T | 15 | U.S. Pat. No. 9,233,131 SEQ ID NO: 42 |
| AAV223.10 | 16 | US20030138772 SEQ ID NO: 75 |
| AAV223.2 | 17 | US20030138772 SEQ ID NO: 49 |
| AAV223.2 | 18 | US20030138772 SEQ ID NO: 76 |
| AAV223.4 | 19 | US20030138772 SEQ ID NO: 50 |
| AAV223.4 | 20 | US20030138772 SEQ ID NO: 73 |
| AAV223.5 | 21 | US20030138772 SEQ ID NO: 51 |
| AAV223.5 | 22 | US20030138772 SEQ ID NO: 74 |
| AAV223.6 | 23 | US20030138772 SEQ ID NO: 52 |
| AAV223.6 | 24 | US20030138772 SEQ ID NO: 78 |
| AAV223.7 | 25 | US20030138772 SEQ ID NO: 53 |
| AAV223.7 | 26 | US20030138772 SEQ ID NO: 77 |
| AAV29.3 | 27 | US20030138772 SEQ ID NO: 82 |
| AAV29.4 | 28 | US20030138772 SEQ ID NO: 12 |
| AAV29.5 | 29 | US20030138772 SEQ ID NO: 83 |
| AAV29.5 (AAVbb.2) | 30 | US20030138772 SEQ ID NO: 13 |
| AAV3 | 31 | US20150159173 SEQ ID NO: 12 |
| AAV3 | 32 | US20030138772 SEQ ID NO: 71, |
| | | US20150159173 SEQ ID NO: 28, |
| | | US20160017295 SEQ ID NO: 3, |
| | | U.S. Pat. No. 7,198,951 SEQ ID NO: 6 |
| AAV3 | 33 | US20030138772 SEQ ID NO: 8 |
| AAV3.3b | 34 | US20030138772 SEQ ID NO: 72 |
| AAV3-3 | 35 | US20150315612 SEQ ID NO: 200 |
| AAV3-3 | 36 | US20150315612 SEQ ID NO: 217 |
| AAV3a | 37 | U.S. Pat. No. 6,156,303 SEQ ID NO: 5 |
| AAV3a | 38 | U.S. Pat. No. 6,156,303 SEQ ID NO: 9 |
| AAV3b | 39 | U.S. Pat. No. 6,156,303 SEQ ID NO: 6 |
| AAV3b | 40 | U.S. Pat. No. 6,156,303 SEQ ID NO: 10 |
| AAV3b | 41 | U.S. Pat. No. 6,156,303 SEQ ID NO: 1 |
| AAV4 | 42 | US20140348794 SEQ ID NO: 17 |
| AAV4 | 43 | US20140348794 SEQ ID NO: 5 |
| AAV4 | 44 | US20140348794 SEQ ID NO: 3 |
| AAV4 | 45 | US20140348794 SEQ ID NO: 14 |
| AAV4 | 46 | US20140348794 SEQ ID NO: 15 |
| AAV4 | 47 | US20140348794 SEQ ID NO: 19 |
| AAV4 | 48 | US20140348794 SEQ ID NO: 12 |
| AAV4 | 49 | US20140348794 SEQ ID NO: 13 |
| AAV4 | 50 | US20140348794 SEQ ID NO: 7 |
| AAV4 | 51 | US20140348794 SEQ ID NO: 8 |
| AAV4 | 52 | US20140348794 SEQ ID NO: 9 |
| AAV4 | 53 | US20140348794 SEQ ID NO: 2 |
| AAV4 | 54 | US20140348794 SEQ ID NO: 10 |
| AAV4 | 55 | US20140348794 SEQ ID NO: 11 |
| AAV4 | 56 | US20140348794 SEQ ID NO: 18 |
| AAV4 | 57 | US20030138772 SEQ ID NO: 63, |
| | | US20160017295 SEQ ID NO: 4, |
| | | US20140348794 SEQ ID NO: 4 |
| AAV4 | 58 | US20140348794 SEQ ID NO: 16 |
| AAV4 | 59 | US20140348794 SEQ ID NO: 20 |
| AAV4 | 60 | US20140348794 SEQ ID NO: 6 |
| AAV4 | 61 | US20140348794 SEQ ID NO: 1 |
| AAV42.2 | 62 | US20030138772 SEQ ID NO: 9 |
| AAV42.2 | 63 | US20030138772 SEQ ID NO: 102 |
| AAV42.3b | 64 | US20030138772 SEQ ID NO: 36 |
| AAV42.3B | 65 | US20030138772 SEQ ID NO: 107 |
| AAV42.4 | 66 | US20030138772 SEQ ID NO: 33 |
| AAV42.4 | 67 | US20030138772 SEQ ID NO: 88 |
| AAV42.8 | 68 | US20030138772 SEQ ID NO: 27 |
| AAV42.8 | 69 | US20030138772 SEQ ID NO: 85 |
| AAV43.1 | 70 | US20030138772 SEQ ID NO: 39 |
| AAV43.1 | 71 | US20030138772 SEQ ID NO: 92 |
| AAV43.12 | 72 | US20030138772 SEQ ID NO: 41 |
| AAV43.12 | 73 | US20030138772 SEQ ID NO: 93 |
| AAV43.20 | 74 | US20030138772 SEQ ID NO: 42 |
| AAV43.20 | 75 | US20030138772 SEQ ID NO: 99 |
| AAV43.21 | 76 | US20030138772 SEQ ID NO: 43 |
| AAV43.21 | 77 | US20030138772 SEQ ID NO: 96 |
| AAV43.23 | 78 | US20030138772 SEQ ID NO: 44 |
| AAV43.23 | 79 | US20030138772 SEQ ID NO: 98 |
| AAV43.25 | 80 | US20030138772 SEQ ID NO: 45 |
| AAV43.25 | 81 | US20030138772 SEQ ID NO: 97 |
| AAV43.5 | 82 | US20030138772 SEQ ID NO: 40 |
| AAV43.5 | 83 | US20030138772 SEQ ID NO: 94 |
| AAV4-4 | 84 | US20150315612 SEQ ID NO: 201 |
| AAV4-4 | 85 | US20150315612 SEQ ID NO: 218 |
| AAV44.1 | 86 | US20030138772 SEQ ID NO: 46 |
| AAV44.1 | 87 | US20030138772 SEQ ID NO: 79 |
| AAV44.5 | 88 | US20030138772 SEQ ID NO: 47 |
| AAV44.5 | 89 | US20030138772 SEQ ID NO: 80 |
| AAV4407 | 90 | US20150315612 SEQ ID NO: 90 |
| AAV5 | 91 | U.S. Pat. No. 7,427,396 SEQ ID NO: 1 |
| AAV5 | 92 | US20030138772 SEQ ID NO: 114 |
| AAV5 | 93 | US20160017295 SEQ ID NO: 5, |
| | | U.S. Pat. No. 7,427,396 SEQ ID NO: 2, |
| | | US20150315612 SEQ ID NO: 216 |
| AAV5 | 94 | US20150315612 SEQ ID NO: 199 |
| AAV6 | 95 | US20150159173 SEQ ID NO: 13 |
| AAV6 | 96 | US20030138772 SEQ ID NO: 65, |
| | | US20150159173 SEQ ID NO: 29, |
| | | US20160017295 SEQ ID NO: 6, |
| | | U.S. Pat. No. 6,156,303 SEQ ID NO: 7 |
| AAV6 | 97 | U.S. Pat. No. 6,156,303 SEQ ID NO: 11 |
| AAV6 | 98 | U.S. Pat. No. 6,156,303 SEQ ID NO: 2 |
| AAV6 | 99 | US20150315612 SEQ ID NO: 203 |
| AAV6 | 100 | US20150315612 SEQ ID NO: 220 |
| AAV6.1 | 101 | US20150159173 |
| AAV6.12 | 102 | US20150159173 |
| AAV6.2 | 103 | US20150159173 |
| AAV7 | 104 | US20150159173 SEQ ID NO: 14 |
| AAV7 | 105 | US20150315612 SEQ ID NO: 183 |
| AAV7 | 106 | US20030138772 SEQ ID NO: 2, |
| | | US20150159173 SEQ ID NO: 30, |
| | | US20150315612 SEQ ID NO: 181, |
| | | US20160017295 SEQ ID NO: 7 |
| AAV7 | 107 | US20030138772 SEQ ID NO: 3 |
| AAV7 | 108 | US20030138772 SEQ ID NO: 1, |
| | | US20150315612 SEQ ID NO: 180 |
| AAV7 | 109 | US20150315612 SEQ ID NO: 213 |
| AAV7 | 110 | US20150315612 SEQ ID NO: 222 |
| AAV8 | 111 | US20150159173 SEQ ID NO: 15 |
| AAV8 | 112 | US20150376240 SEQ ID NO: 7 |
| AAV8 | 113 | US20030138772 SEQ ID NO: 4, |
| | | US20150315612 SEQ ID NO: 182 |
| AAV8 | 114 | US20030138772 SEQ ID NO: 95, |
| | | US20140359799 SEQ ID NO: 1, |
| | | US20150159173 SEQ ID NO: 31, |
| | | US20160017295 SEQ ID NO: 8, |
| | | U.S. Pat. No. 7,198,951 SEQ ID NO: 7, |
| | | US20150315612 SEQ ID NO: 223 |
| AAV8 | 115 | US20150376240 SEQ ID NO: 8 |
| AAV8 | 116 | US20150315612 SEQ ID NO: 214 |
| AAV-8b | 117 | US20150376240 SEQ ID NO: 5 |
| AAV-8b | 118 | US20150376240 SEQ ID NO: 3 |
| AAV-8h | 119 | US20150376240 SEQ ID NO: 6 |
| AAV-8h | 120 | US20150376240 SEQ ID NO: 4 |
| AAV9 | 121 | US20030138772 SEQ ID NO: 5 |
| AAV9 | 122 | U.S. Pat. No. 7,198,951 SEQ ID NO: 1 |
| AAV9 | 123 | US20160017295 SEQ ID NO: 9 |
| AAV9 | 124 | US20030138772 SEQ ID NO: 100, |
| | | U.S. Pat. No. 7,198,951 SEQ ID NO: 2 |
| AAV9 | 125 | U.S. Pat. No. 7,198,951 SEQ ID NO: 3 |
| AAV9 (AAVhu.14) | 126 | US20150315612 SEQ ID NO: 3 |
| AAV9 (AAVhu.14) | 127 | US20150315612 SEQ ID NO: 123 |
| AAVA3.1 | 128 | US20030138772 SEQ ID NO: 120 |
| AAVA3.3 | 129 | US20030138772 SEQ ID NO: 57 |
| AAVA3.3 | 130 | US20030138772 SEQ ID NO: 66 |
| AAVA3.4 | 131 | US20030138772 SEQ ID NO: 54 |
| AAVA3.4 | 132 | US20030138772 SEQ ID NO: 68 |
| AAVA3.5 | 133 | US20030138772 SEQ ID NO: 55 |
| AAVA3.5 | 134 | US20030138772 SEQ ID NO: 69 |
| AAVA3.7 | 135 | US20030138772 SEQ ID NO: 56 |
| AAVA3.7 | 136 | US20030138772 SEQ ID NO: 67 |
| AAV29.3 (AAVbb.1) | 137 | US20030138772 SEQ ID NO: 11 |
| AAVC2 | 138 | US20030138772 SEQ ID NO: 61 |
| AAVCh.5 | 139 | US20150159173 SEQ ID NO: 46, |
| | | US20150315612 SEQ ID NO: 234 |
| AAVcy.2 (AAV13.3) | 140 | US20030138772 SEQ ID NO: 15 |
| AAV24.1 | 141 | US20030138772 SEQ ID NO: 101 |
| AAVcy.3 (AAV24.1) | 142 | US20030138772 SEQ ID NO: 16 |
| AAV27.3 | 143 | US20030138772 SEQ ID NO: 104 |
| AAVcy.4 (AAV27.3) | 144 | US20030138772 SEQ ID NO: 17 |
| AAVcy.5 | 145 | US20150315612 SEQ ID NO: 227 |
| AAV7.2 | 146 | US20030138772 SEQ ID NO: 103 |
| AAVcy.5 (AAV7.2) | 147 | US20030138772 SEQ ID NO: 18 |
| AAV16.3 | 148 | US20030138772 SEQ ID NO: 105 |
| AAVcy.6 (AAV16.3) | 149 | US20030138772 SEQ ID NO: 10 |
| AAVcy.5 | 150 | US20150159173 SEQ ID NO: 8 |
| AAVcy.5 | 151 | US20150159173 SEQ ID NO: 24 |
| AAVCy.5R1 | 152 | US20150159173 |
| AAVCy.5R2 | 153 | US20150159173 |
| AAVCy.5R3 | 154 | US20150159173 |
| AAVCy.5R4 | 155 | US20150159173 |
| AAVDJ | 156 | US20140359799 SEQ ID NO: 3, |
| | | U.S. Pat. No. 7,588,772 SEQ ID NO: 2 |
| AAVDJ | 157 | US20140359799 SEQ ID NO: 2, |
| | | U.S. Pat. No. 7,588,772 SEQ ID NO: 1 |
| AAVDJ-8 | 158 | U.S. Pat. No. 7,588,772; Grimm |
| | | et al 2008 |
| AAVDJ-8 | 159 | U.S. Pat. No. 7,588,772; Grimm |
| | | et al 2008 |
| AAVF5 | 160 | US20030138772 SEQ ID NO: 110 |
| AAVH2 | 161 | US20030138772 SEQ ID NO: 26 |
| AAVH6 | 162 | US20030138772 SEQ ID NO: 25 |
| AAVhE1.1 | 163 | U.S. Pat. No. 9,233,131 SEQ ID NO: 44 |
| AAVhEr1.14 | 164 | U.S. Pat. No. 9,233,131 SEQ ID NO: 46 |
| AAVhEr1.16 | 165 | U.S. Pat. No. 9,233,131 SEQ ID NO: 48 |
| AAVhEr1.18 | 166 | U.S. Pat. No. 9,233,131 SEQ ID NO: 49 |
| AAVhEr1.23 | 167 | U.S. Pat. No. 9,233,131 SEQ ID NO: 53 |
| (AAVhEr2.29) | | |
| AAVhEr1.35 | 168 | U.S. Pat. No. 9,233,131 SEQ ID NO: 50 |
| AAVhEr1.36 | 169 | U.S. Pat. No. 9,233,131 SEQ ID NO: 52 |
| AAVhEr1.5 | 170 | U.S. Pat. No. 9,233,131 SEQ ID NO: 45 |
| AAVhEr1.7 | 171 | U.S. Pat. No. 9,233,131 SEQ ID NO: 51 |
| AAVhEr1.8 | 172 | U.S. Pat. No. 9,233,131 SEQ ID NO: 47 |
| AAVhEr2.16 | 173 | U.S. Pat. No. 9,233,131 SEQ ID NO: 55 |
| AAVhEr2.30 | 174 | U.S. Pat. No. 9,233,131 SEQ ID NO: 56 |
| AAVhEr2.31 | 175 | U.S. Pat. No. 9,233,131 SEQ ID NO: 58 |
| AAVhEr2.36 | 176 | U.S. Pat. No. 9,233,131 SEQ ID NO: 57 |
| AAVhEr2.4 | 177 | U.S. Pat. No. 9,233,131 SEQ ID NO: 54 |
| AAVhEr3.1 | 178 | U.S. Pat. No. 9,233,131 SEQ ID NO: 59 |
| AAVhu.1 | 179 | US20150315612 SEQ ID NO: 46 |
| AAVhu.1 | 180 | US20150315612 SEQ ID NO: 144 |
| AAVhu.10 | 181 | US20150315612 SEQ ID NO: 56 |
| (AAV16.8) | | |
| AAVhu.10 | 182 | US20150315612 SEQ ID NO: 156 |
| (AAV16.8) | | |
| AAVhu.11 | 183 | US20150315612 SEQ ID NO: 57 |
| (AAV16.12) | | |
| AAVhu.11 | 184 | US20150315612 SEQ ID NO: 153 |
| (AAV16.12) | | |
| AAVhu.12 | 185 | US20150315612 SEQ ID NO: 59 |
| AAVhu.12 | 186 | US20150315612 SEQ ID NO: 154 |
| AAVhu.13 | 187 | US20150159173 SEQ ID NO: 16, |
| | | US20150315612 SEQ ID NO: 71 |
| AAVhu.13 | 188 | US20150159173 SEQ ID NO: 32, |
| | | US20150315612 SEQ ID NO: 129 |
| AAVhu.136.1 | 189 | US20150315612 SEQ ID NO: 165 |
| AAVhu.140.1 | 190 | US20150315612 SEQ ID NO: 166 |
| AAVhu.140.2 | 191 | US20150315612 SEQ ID NO: 167 |
| AAVhu.145.6 | 192 | US20150315612 SEQ ID No: 178 |
| AAVhu.15 | 193 | US20150315612 SEQ ID NO: 147 |
| AAVhu.15 | 194 | US20150315612 SEQ ID NO: 50 |
| (AAV33.4) | | |
| AAVhu.156.1 | 195 | US20150315612 SEQ ID No: 179 |
| AAVhu.16 | 196 | US20150315612 SEQ ID NO: 148 |
| AAVhu.16 | 197 | US20150315612 SEQ ID NO: 51 |
| (AAV33.8) | | |
| AAVhu.17 | 198 | US20150315612 SEQ ID NO: 83 |
| AAVhu.17 | 199 | US20150315612 SEQ ID NO: 4 |
| (AAV33.12) | | |
| AAVhu.172.1 | 200 | US20150315612 SEQ ID NO: 171 |
| AAVhu.172.2 | 201 | US20150315612 SEQ ID NO: 172 |
| AAVhu.173.4 | 202 | US20150315612 SEQ ID NO: 173 |
| AAVhu.173.8 | 203 | US20150315612 SEQ ID NO: 175 |
| AAVhu.18 | 204 | US20150315612 SEQ ID NO: 52 |
| AAVhu.18 | 205 | US20150315612 SEQ ID NO: 149 |
| AAVhu.19 | 206 | US20150315612 SEQ ID NO: 62 |
| AAVhu.19 | 207 | US20150315612 SEQ ID NO: 133 |
| AAVhu.2 | 208 | US20150315612 SEQ ID NO: 48 |
| AAVhu.2 | 209 | US20150315612 SEQ ID NO: 143 |
| AAVhu.20 | 210 | US20150315612 SEQ ID NO: 63 |
| AAVhu.20 | 211 | US20150315612 SEQ ID NO: 134 |
| AAVhu.21 | 212 | US20150315612 SEQ ID NO: 65 |
| AAVhu.21 | 213 | US20150315612 SEQ ID NO: 135 |
| AAVhu.22 | 214 | US20150315612 SEQ ID NO: 67 |
| AAVhu.22 | 215 | US20150315612 SEQ ID NO: 138 |
| AAVhu.23 | 216 | US20150315612 SEQ ID NO: 60 |
| AAVhu.23.2 | 217 | US20150315612 SEQ ID NO: 137 |
| AAVhu.24 | 218 | US20150315612 SEQ ID NO: 66 |
| AAVhu.24 | 219 | US20150315612 SEQ ID NO: 136 |
| AAVhu.25 | 220 | US20150315612 SEQ ID NO: 49 |
| AAVhu.25 | 221 | US20150315612 SEQ ID NO: 146 |
| AAVhu.26 | 222 | US20150159173 SEQ ID NO: 17, |
| | | US20150315612 SEQ ID NO: 61 |
| AAVhu.26 | 223 | US20150159173 SEQ ID NO: 33, |
| | | US20150315612 SEQ ID NO: 139 |
| AAVhu.27 | 224 | US20150315612 SEQ ID NO: 64 |
| AAVhu.27 | 225 | US20150315612 SEQ ID NO: 140 |
| AAVhu.28 | 226 | US20150315612 SEQ ID NO: 68 |
| AAVhu.28 | 227 | US20150315612 SEQ ID NO: 130 |
| AAVhu.29 | 228 | US20150315612 SEQ ID NO: 69 |
| AAVhu.29 | 229 | US20150159173 SEQ ID NO: 42, |
| | | US20150315612 SEQ ID NO: 132 |
| AAVhu.29 | 230 | US20150315612 SEQ ID NO: 225 |
| AAVhu.29R | 231 | US20150159173 |
| AAVhu.3 | 232 | US20150315612 SEQ ID NO: 44 |
| AAVhu.3 | 233 | US20150315612 SEQ ID NO: 145 |
| AAVhu.30 | 234 | US20150315612 SEQ ID NO: 70 |
| AAVhu.30 | 235 | US20150315612 SEQ ID NO: 131 |
| AAVhu.31 | 236 | US20150315612 SEQ ID NO: 1 |
| AAVhu.31 | 237 | US20150315612 SEQ ID NO: 121 |
| AAVhu.32 | 238 | US20150315612 SEQ ID NO: 2 |
| AAVhu.32 | 239 | US20150315612 SEQ ID NO: 122 |
| AAVhu.33 | 240 | US20150315612 SEQ ID NO: 75 |
| AAVhu.33 | 241 | US20150315612 SEQ ID NO: 124 |
| AAVhu.34 | 242 | US20150315612 SEQ ID NO: 72 |
| AAVhu.34 | 243 | US20150315612 SEQ ID NO: 125 |
| AAVhu.35 | 244 | US20150315612 SEQ ID NO: 73 |
| AAVhu.35 | 245 | US20150315612 SEQ ID NO: 164 |
| AAVhu.36 | 246 | US20150315612 SEQ ID NO: 74 |
| AAVhu.36 | 247 | US20150315612 SEQ ID NO: 126 |
| AAVhu.37 | 248 | US20150159173 SEQ ID NO: 34, |
| | | US20150315612 SEQ ID NO: 88 |
| AAVhu.37 | 249 | US20150315612 SEQ ID NO: 10, |
| (AAV106.1) | | US20150159173 SEQ ID NO: 18 |
| AAVhu.38 | 250 | US20150315612 SEQ ID NO: 161 |
| AAVhu.39 | 251 | US20150315612 SEQ ID NO: 102 |
| AAVhu.39 | 252 | US20150315612 SEQ ID NO: 24 |
| (AAVLG-9) | | |
| AAVhu.4 | 253 | US20150315612 SEQ ID NO: 47 |
| AAVhu.4 | 254 | US20150315612 SEQ ID NO: 141 |
| AAVhu.40 | 255 | US20150315612 SEQ ID NO: 87 |
| AAVhu.40 | 256 | US20150315612 SEQ ID No: 11 |
| (AAV114.3) | | |
| AAVhu.41 | 257 | US20150315612 SEQ ID NO: 91 |
| AAVhu.41 | 258 | US20150315612 SEQ ID NO: 6 |
| (AAV127.2) | | |
| AAVhu.42 | 259 | US20150315612 SEQ ID NO: 85 |
| AAVhu.42 | 260 | US20150315612 SEQ ID NO: 8 |
| (AAV127.5) | | |
| AAVhu.43 | 261 | US20150315612 SEQ ID NO: 160 |
| AAVhu.43 | 262 | US20150315612 SEQ ID NO: 236 |
| AAVhu.43 | 263 | US20150315612 SEQ ID NO: 80 |
| (AAV128.1) | | |
| AAVhu.44 | 264 | US20150159173 SEQ ID NO: 45, |
| | | US20150315612 SEQ ID NO: 158 |
| AAVhu.44 | 265 | US20150315612 SEQ ID NO: 81 |
| (AAV128.3) | | |
| AAVhu.44R1 | 266 | US20150159173 |
| AAVhu.44R2 | 267 | US20150159173 |
| AAVhu.44R3 | 268 | US20150159173 |
| AAVhu.45 | 269 | US20150315612 SEQ ID NO: 76 |
| AAVhu.45 | 270 | US20150315612 SEQ ID NO: 127 |
| AAVhu.46 | 271 | US20150315612 SEQ ID NO: 82 |
| AAVhu.46 | 272 | US20150315612 SEQ ID NO: 159 |
| AAVhu.46 | 273 | US20150315612 SEQ ID NO: 224 |
| AAVhu.47 | 274 | US20150315612 SEQ ID NO: 77 |
| AAVhu.47 | 275 | US20150315612 SEQ ID NO: 128 |
| AAVhu.48 | 276 | US20150159173 SEQ ID NO: 38 |
| AAVhu.48 | 277 | US20150315612 SEQ ID NO: 157 |
| AAVhu.48 | 278 | US20150315612 SEQ ID NO: 78 |
| (AAV130.4) | | |
| AAVhu.48R1 | 279 | US20150159173 |
| AAVhu.48R2 | 280 | US20150159173 |
| AAVhu.48R3 | 281 | US20150159173 |
| AAVhu.49 | 282 | US20150315612 SEQ ID NO: 209 |
| AAVhu.49 | 283 | US20150315612 SEQ ID NO: 189 |
| AAVhu.5 | 284 | US20150315612 SEQ ID NO: 45 |
| AAVhu.5 | 285 | US20150315612 SEQ ID NO: 142 |
| AAVhu.51 | 286 | US20150315612 SEQ ID NO: 208 |
| AAVhu.51 | 287 | US20150315612 SEQ ID NO: 190 |
| AAVhu.52 | 288 | US20150315612 SEQ ID NO: 210 |
| AAVhu.52 | 289 | US20150315612 SEQ ID NO: 191 |
| AAVhu.53 | 290 | US20150159173 SEQ ID NO: 19 |
| AAVhu.53 | 291 | US20150159173 SEQ ID NO: 35 |
| AAVhu.53 | 292 | US20150315612 SEQ ID NO: 176 |
| (AAV145.1) | | |
| AAVhu.54 | 293 | US20150315612 SEQ ID NO: 188 |
| AAVhu.54 | 294 | US20150315612 SEQ ID No: 177 |
| (AAV145.5) | | |
| AAVhu.55 | 295 | US20150315612 SEQ ID NO: 187 |
| AAVhu.56 | 296 | US20150315612 SEQ ID NO: 205 |
| AAVhu.56 | 297 | US20150315612 SEQ ID NO: 168 |
| (AAV145.6) | | |
| AAVhu.56 | 298 | US20150315612 SEQ ID NO: 192 |
| (AAV145.6) | | |
| AAVhu.57 | 299 | US20150315612 SEQ ID NO: 206 |
| AAVhu.57 | 300 | US20150315612 SEQ ID NO: 169 |
| AAVhu.57 | 301 | US20150315612 SEQ ID NO: 193 |
| AAVhu.58 | 302 | US20150315612 SEQ ID NO: 207 |
| AAVhu.58 | 303 | US20150315612 SEQ ID NO: 194 |
| AAVhu.6 (AAV3.1) | 304 | US20150315612 SEQ ID NO: 5 |
| AAVhu.6 (AAV3.1) | 305 | US20150315612 SEQ ID NO: 84 |
| AAVhu.60 | 306 | US20150315612 SEQ ID NO: 184 |
| AAVhu.60 | 307 | US20150315612 SEQ ID NO: 170 |
| (AAV161.10) | | |
| AAVhu.61 | 308 | US20150315612 SEQ ID NO: 185 |
| AAVhu.61 | 309 | US20150315612 SEQ ID NO: 174 |
| (AAV161.6) | | |
| AAVhu.63 | 310 | US20150315612 SEQ ID NO: 204 |
| AAVhu.63 | 311 | US20150315612 SEQ ID NO: 195 |
| AAVhu.64 | 312 | US20150315612 SEQ ID NO: 212 |
| AAVhu.64 | 313 | US20150315612 SEQ ID NO: 196 |
| AAVhu.66 | 314 | US20150315612 SEQ ID NO: 197 |
| AAVhu.67 | 315 | US20150315612 SEQ ID NO: 215 |
| AAVhu.67 | 316 | US20150315612 SEQ ID NO: 198 |
| AAVhu.7 | 317 | US20150315612 SEQ ID NO: 226 |
| AAVhu.7 | 318 | US20150315612 SEQ ID NO: 150 |
| AAVhu.7 (AAV7.3) | 319 | US20150315612 SEQ ID NO: 55 |
| AAVhu.71 | 320 | US20150315612 SEQ ID NO: 79 |
| AAVhu.8 | 321 | US20150315612 SEQ ID NO: 53 |
| AAVhu.8 | 322 | US20150315612 SEQ ID NO: 12 |
| AAVhu.8 | 323 | US20150315612 SEQ ID NO: 151 |
| AAVhu.9 (AAV3.1) | 324 | US20150315612 SEQ ID NO: 58 |
| AAVhu.9 (AAV3.1) | 325 | US20150315612 SEQ ID NO: 155 |
| AAV-LK01 | 326 | US20150376607 SEQ ID NO: 2 |
| AAV-LK01 | 327 | US20150376607 SEQ ID NO: 29 |
| AAV-LK02 | 328 | US20150376607 SEQ ID NO: 3 |
| AAV-LK02 | 329 | US20150376607 SEQ ID NO: 30 |
| AAV-LK03 | 330 | US20150376607 SEQ ID NO: 4 |
| AAV-LK03 | 331 | WO2015121501 SEQ ID NO: 12, |
| | | US20150376607 SEQ ID NO: 31 |
| AAV-LK04 | 332 | US20150376607 SEQ ID NO: 5 |
| AAV-LK04 | 333 | US20150376607 SEQ ID NO: 32 |
| AAV-LK05 | 334 | US20150376607 SEQ ID NO: 6 |
| AAV-LK05 | 335 | US20150376607 SEQ ID NO: 33 |
| AAV-LK06 | 336 | US20150376607 SEQ ID NO: 7 |
| AAV-LK06 | 337 | US20150376607 SEQ ID NO: 34 |
| AAV-LK07 | 338 | US20150376607 SEQ ID NO: 8 |
| AAV-LK07 | 339 | US20150376607 SEQ ID NO: 35 |
| AAV-LK08 | 340 | US20150376607 SEQ ID NO: 9 |
| AAV-LK08 | 341 | US20150376607 SEQ ID NO: 36 |
| AAV-LK09 | 342 | US20150376607 SEQ ID NO: 10 |
| AAV-LK09 | 343 | US20150376607 SEQ ID NO: 37 |
| AAV-LK10 | 344 | US20150376607 SEQ ID NO: 11 |
| AAV-LK10 | 345 | US20150376607 SEQ ID NO: 38 |
| AAV-LK11 | 346 | US20150376607 SEQ ID NO: 12 |
| AAV-LK11 | 347 | US20150376607 SEQ ID NO: 39 |
| AAV-LK12 | 348 | US20150376607 SEQ ID NO: 13 |
| AAV-LK12 | 349 | US20150376607 SEQ ID NO: 40 |
| AAV-LK13 | 350 | US20150376607 SEQ ID NO: 14 |
| AAV-LK13 | 351 | US20150376607 SEQ ID NO: 41 |
| AAV-LK14 | 352 | US20150376607 SEQ ID NO: 15 |
| AAV-LK14 | 353 | US20150376607 SEQ ID NO: 42 |
| AAV-LK15 | 354 | US20150376607 SEQ ID NO: 16 |
| AAV-LK15 | 355 | US20150376607 SEQ ID NO: 43 |
| AAV-LK16 | 356 | US20150376607 SEQ ID NO: 17 |
| AAV-LK16 | 357 | US20150376607 SEQ ID NO: 44 |
| AAV-LK17 | 358 | US20150376607 SEQ ID NO: 18 |
| AAV-LK17 | 359 | US20150376607 SEQ ID NO: 45 |
| AAV-LK18 | 360 | US20150376607 SEQ ID NO: 19 |
| AAV-LK18 | 361 | US20150376607 SEQ ID NO: 46 |
| AAV-LK19 | 362 | US20150376607 SEQ ID NO: 20 |
| AAV-LK19 | 363 | US20150376607 SEQ ID NO: 47 |
| AAV-PAEC | 364 | US20150376607 SEQ ID NO: 1 |
| AAV-PAEC | 365 | US20150376607 SEQ ID NO: 48 |
| AAV-PAEC11 | 366 | US20150376607 SEQ ID NO: 26 |
| AAV-PAEC11 | 367 | US20150376607 SEQ ID NO: 54 |
| AAV-PAEC12 | 368 | US20150376607 SEQ ID NO: 27 |
| AAV-PAEC12 | 369 | US20150376607 SEQ ID NO: 51 |
| AAV-PAEC13 | 370 | US20150376607 SEQ ID NO: 28 |
| AAV-PAEC13 | 371 | US20150376607 SEQ ID NO: 49 |
| AAV-PAEC2 | 372 | US20150376607 SEQ ID NO: 21 |
| AAV-PAEC2 | 373 | US20150376607 SEQ ID NO: 56 |
| AAV-PAEC4 | 374 | US20150376607 SEQ ID NO: 22 |
| AAV-PAEC4 | 375 | US20150376607 SEQ ID NO: 55 |
| AAV-PAEC6 | 376 | US20150376607 SEQ ID NO: 23 |
| AAV-PAEC6 | 377 | US20150376607 SEQ ID NO: 52 |
| AAV-PAEC7 | 378 | US20150376607 SEQ ID NO: 24 |
| AAV-PAEC7 | 379 | US20150376607 SEQ ID NO: 53 |
| AAV-PAEC8 | 380 | US20150376607 SEQ ID NO: 25 |
| AAV-PAEC8 | 381 | US20150376607 SEQ ID NO: 50 |
| AAVpi.1 | 382 | US20150315612 SEQ ID NO: 28 |
| AAVpi.1 | 383 | US20150315612 SEQ ID NO: 93 |
| AAVpi.2 | 384 | US20150315612 SEQ ID NO: 30 |
| AAVpi.2 | 385 | US20150315612 SEQ ID NO: 95 |
| AAVpi.3 | 386 | US20150315612 SEQ ID NO: 29 |
| AAVpi.3 | 387 | US20150315612 SEQ ID NO: 94 |
| AAVrh.10 | 388 | US20150159173 SEQ ID NO: 9 |
| AAVrh.10 | 389 | US20150159173 SEQ ID NO: 25 |
| AAV44.2 | 390 | US20030138772 SEQ ID NO: 59 |
| AAVrh.10 | 391 | US20030138772 SEQ ID NO: 81 |
| (AAV44.2) | | |
| AAV42.1B | 392 | US20030138772 SEQ ID NO: 90 |
| AAVrh.12 | 393 | US20030138772 SEQ ID NO: 30 |
| (AAV42.1b) | | |
| AAVrh.13 | 394 | US20150159173 SEQ ID NO: 10 |
| AAVrh.13 | 395 | US20150159173 SEQ ID NO: 26 |
| AAVrh.13 | 396 | US20150315612 SEQ ID NO: 228 |
| AAVrh.13R | 397 | US20150159173 |
| AAV42.3A | 398 | US20030138772 SEQ ID NO: 87 |
| AAVrh.14 | 399 | US20030138772 SEQ ID NO: 32 |
| (AAV42.3a) | | |
| AAV42.5A | 400 | US20030138772 SEQ ID NO: 89 |
| AAVrh.17 | 401 | US20030138772 SEQ ID NO: 34 |
| (AAV42.5a) | | |
| AAV42.5B | 402 | US20030138772 SEQ ID NO: 91 |
| AAVrh.18 | 403 | US20030138772 SEQ ID NO: 29 |
| (AAV42.5b) | | |
| AAV42.6B | 404 | US20030138772 SEQ ID NO: 112 |
| AAVrh.19 | 405 | US20030138772 SEQ ID NO: 38 |
| (AAV42.6b) | | |
| AAVrh.2 | 406 | US20150159173 SEQ ID NO: 39 |
| AAVrh.2 | 407 | US20150315612 SEQ ID NO: 231 |
| AAVrh.20 | 408 | US20150159173 SEQ ID NO: 1 |
| AAV42.10 | 409 | US20030138772 SEQ ID NO: 106 |
| AAVrh.21 | 410 | US20030138772 SEQ ID NO: 35 |
| (AAV42.10) | | |
| AAV42.11 | 411 | US20030138772 SEQ ID NO: 108 |
| AAVrh.22 | 412 | US20030138772 SEQ ID NO: 37 |
| (AAV42.11) | | |
| AAV42.12 | 413 | US20030138772 SEQ ID NO: 113 |
| AAVrh.23 | 414 | US20030138772 SEQ ID NO: 58 |
| (AAV42.12) | | |
| AAV42.13 | 415 | US20030138772 SEQ ID NO: 86 |
| AAVrh.24 | 416 | US20030138772 SEQ ID NO: 31 |
| (AAV42.13) | | |
| AAV42.15 | 417 | US20030138772 SEQ ID NO: 84 |
| AAVrh.25 | 418 | US20030138772 SEQ ID NO: 28 |
| (AAV42.15) | | |
| AAVrh.2R | 419 | US20150159173 |
| AAVrh.31 | 420 | US20030138772 SEQ ID NO: 48 |
| (AAV223.1) | | |
| AAVC1 | 421 | US20030138772 SEQ ID NO: 60 |
| AAVrh.32 (AAVC1) | 422 | US20030138772 SEQ ID NO: 19 |
| AAVrh.32/33 | 423 | US20150159173 SEQ ID NO: 2 |
| AAVrh.33 (AAVC3) | 424 | US20030138772 SEQ ID NO: 20 |
| AAVC5 | 425 | US20030138772 SEQ ID NO: 62 |
| AAVrh.34 (AAVC5) | 426 | US20030138772 SEQ ID NO: 21 |
| AAVF1 | 427 | US20030138772 SEQ ID NO: 109 |
| AAVrh.35 (AAVF1) | 428 | US20030138772 SEQ ID NO: 22 |
| AAVF3 | 429 | US20030138772 SEQ ID NO: 111 |
| AAVrh.36 (AAVF3) | 430 | US20030138772 SEQ ID NO: 23 |
| AAVrh.37 | 431 | US20030138772 SEQ ID NO: 24 |
| AAVrh.37 | 432 | US20150159173 SEQ ID NO: 40 |
| AAVrh.37 | 433 | US20150315612 SEQ ID NO: 229 |
| AAVrh.37R2 | 434 | US20150159173 |
| AAVrh.38 | 435 | US20150315612 SEQ ID NO: 7 |
| (AAVLG-4) | | |
| AAVrh.38 | 436 | US20150315612 SEQ ID NO: 86 |
| (AAVLG-4) | | |
| AAVrh.39 | 437 | US20150159173 SEQ ID NO: 20, |
| | | US20150315612 SEQ ID NO: 13 |
| AAVrh.39 | 438 | US20150159173 SEQ ID NO: 3, |
| | | US20150159173 SEQ ID NO: 36, |
| | | US20150315612 SEQ ID NO: 89 |
| AAVrh.40 | 439 | US20150315612 SEQ ID NO: 92 |
| AAVrh.40 | 440 | US20150315612 SEQ ID No: 14 |
| (AAVLG-10) | | |
| AAVrh.43 | 441 | US20150315612 SEQ ID NO: 43, |
| (AAVN721-8) | | US20150159173 SEQ ID NO: 21 |
| AAVrh.43 | 442 | US20150315612 SEQ ID NO: 163, |
| (AAVN721-8) | | US20150159173 SEQ ID NO: 37 |
| AAVrh.44 | 443 | US20150315612 SEQ ID NO: 34 |
| AAVrh.44 | 444 | US20150315612 SEQ ID NO: 111 |
| AAVrh.45 | 445 | US20150315612 SEQ ID NO: 41 |
| AAVrh.45 | 446 | US20150315612 SEQ ID NO: 109 |
| AAVrh.46 | 447 | US20150159173 SEQ ID NO: 22, |
| | | US20150315612 SEQ ID NO: 19 |
| AAVrh.46 | 448 | US20150159173 SEQ ID NO: 4, |
| | | US20150315612 SEQ ID NO: 101 |
| AAVrh.47 | 449 | US20150315612 SEQ ID NO: 38 |
| AAVrh.47 | 450 | US20150315612 SEQ ID NO: 118 |
| AAVrh.48 | 451 | US20150159173 SEQ ID NO: 44, |
| | | US20150315612 SEQ ID NO: 115 |
| AAVrh.48.1 | 452 | US20150159173 |
| AAVrh.48.1.2 | 453 | US20150159173 |
| AAVrh.48.2 | 454 | US20150159173 |
| AAVrh.48 (AAV1-7) | 455 | US20150315612 SEQ ID NO: 32 |
| AAVrh.49 (AAV1-8) | 456 | US20150315612 SEQ ID NO: 25 |
| AAVrh.49 (AAV1-8) | 457 | US20150315612 SEQ ID NO: 103 |
| AAVrh.50 (AAV2-4) | 458 | US20150315612 SEQ ID NO: 23 |
| AAVrh.50 (AAV2-4) | 459 | US20150315612 SEQ ID NO: 108 |
| AAVrh.51 (AAV2-5) | 460 | US20150315612 SEQ ID No: 22 |
| AAVrh.51 (AAV2-5) | 461 | US20150315612 SEQ ID NO: 104 |
| AAVrh.52 (AAV3-9) | 462 | US20150315612 SEQ ID NO: 18 |
| AAVrh.52 (AAV3-9) | 463 | US20150315612 SEQ ID NO: 96 |
| AAVrh.53 | 464 | US20150315612 SEQ ID NO: 97 |
| AAVrh.53 | 465 | US20150315612 SEQ ID NO: 17 |
| (AAV3-11) | | |
| AAVrh.53 | 466 | US20150315612 SEQ ID NO: 186 |
| (AAV3-11) | | |
| AAVrh.54 | 467 | US20150315612 SEQ ID NO: 40 |
| AAVrh.54 | 468 | US20150159173 SEQ ID NO: 49, |
| | | US20150315612 SEQ ID NO: 116 |
| AAVrh.55 | 469 | US20150315612 SEQ ID NO: 37 |
| AAVrh.55 | 470 | US20150315612 SEQ ID NO: 117 |
| (AAV4-19) | | |
| AAVrh.56 | 471 | US20150315612 SEQ ID NO: 54 |
| AAVrh.56 | 472 | US20150315612 SEQ ID NO: 152 |
| AAVrh.57 | 473 | US20150315612 SEQ ID NO: 26 |
| AAVrh.57 | 474 | US20150315612 SEQ ID NO: 105 |
| AAVrh.58 | 475 | US20150315612 SEQ ID NO: 27 |
| AAVrh.58 | 476 | US20150159173 SEQ ID NO: 48, |
| | | US20150315612 SEQ ID NO: 106 |
| AAVrh.58 | 477 | US20150315612 SEQ ID NO: 232 |
| AAVrh.59 | 478 | US20150315612 SEQ ID NO: 42 |
| AAVrh.59 | 479 | US20150315612 SEQ ID NO: 110 |
| AAVrh.60 | 480 | US20150315612 SEQ ID NO: 31 |
| AAVrh.60 | 481 | US20150315612 SEQ ID NO: 120 |
| AAVrh.61 | 482 | US20150315612 SEQ ID NO: 107 |
| AAVrh.61 | 483 | US20150315612 SEQ ID NO: 21 |
| (AAV2-3) | | |
| AAVrh.62 | 484 | US20150315612 SEQ ID No: 33 |
| (AAV2-15) | | |
| AAVrh.62 | 485 | US20150315612 SEQ ID NO: 114 |
| (AAV2-15) | | |
| AAVrh.64 | 486 | US20150315612 SEQ ID No: 15 |
| AAVrh.64 | 487 | US20150159173 SEQ ID NO: 43, |
| | | US20150315612 SEQ ID NO: 99 |
| AAVrh.64 | 488 | US20150315612 SEQ ID NO: 233 |
| AAVRh.64R1 | 489 | US20150159173 |
| AAVRh.64R2 | 490 | US20150159173 |
| AAVrh.65 | 491 | US20150315612 SEQ ID NO: 35 |
| AAVrh.65 | 492 | US20150315612 SEQ ID NO: 112 |
| AAVrh.67 | 493 | US20150315612 SEQ ID NO: 36 |
| AAVrh.67 | 494 | US20150315612 SEQ ID NO: 230 |
| AAVrh.67 | 495 | US20150159173 SEQ ID NO: 47, |
| | | US20150315612 SEQ ID NO: 113 |
| AAVrh.68 | 496 | US20150315612 SEQ ID NO: 16 |
| AAVrh.68 | 497 | US20150315612 SEQ ID NO: 100 |
| AAVrh.69 | 498 | US20150315612 SEQ ID NO: 39 |
| AAVrh.69 | 499 | US20150315612 SEQ ID NO: 119 |
| AAVrh.70 | 500 | US20150315612 SEQ ID NO: 20 |
| AAVrh.70 | 501 | US20150315612 SEQ ID NO: 98 |
| AAVrh.71 | 502 | US20150315612 SEQ ID NO: 162 |
| AAVrh.72 | 503 | US20150315612 SEQ ID NO: 9 |
| AAVrh.73 | 504 | US20150159173 SEQ ID NO: 5 |
| AAVrh.74 | 505 | US20150159173 SEQ ID NO: 6 |
| AAVrh.8 | 506 | US20150159173 SEQ ID NO: 41 |
| AAVrh.8 | 507 | US20150315612 SEQ ID NO: 235 |
| AAVrh.8R | 508 | US20150159173, |
| | | WO2015168666 SEQ ID NO: 9 |
| AAVrh.8R A586R | 509 | WO2015168666 SEQ ID NO: 10 |
| mutant | | |
| AAVrh.8R R533A | 510 | WO2015168666 SEQ ID NO: 11 |
| mutant | | |
| BAAV (bovine | 511 | U.S. Pat. No. 9,193,769 SEQ ID NO: 8 |
| AAV) | | |
| BAAV (bovine | 512 | U.S. Pat. No. 9,193,769 SEQ ID NO: 10 |
| AAV) | | |
| BAAV (bovine | 513 | U.S. Pat. No. 9,193,769 SEQ ID NO: 4 |
| AAV) | | |
| BAAV (bovine | 514 | U.S. Pat. No. 9,193,769 SEQ ID NO: 2 |
| AAV) | | |
| BAAV (bovine | 515 | U.S. Pat. No. 9,193,769 SEQ ID NO: 6 |
| AAV) | | |
| BAAV (bovine | 516 | U.S. Pat. No. 9,193,769 SEQ ID NO: 1 |
| AAV) | | |
| BAAV (bovine | 517 | U.S. Pat. No. 9,193,769 SEQ ID NO: 5 |
| AAV) | | |
| BAAV (bovine | 518 | U.S. Pat. No. 9,193,769 SEQ ID NO: 3 |
| AAV) | | |
| BAAV (bovine | 519 | U.S. Pat. No. 9,193,769 SEQ ID NO: 11 |
| AAV) | | |
| BAAV (bovine | 520 | U.S. Pat. No. 7,427,396 SEQ ID NO: 5 |
| AAV) | | |
| BAAV (bovine | 521 | U.S. Pat. No. 7,427,396 SEQ ID NO: 6 |
| AAV) | | |
| BAAV (bovine | 522 | U.S. Pat. No. 9,193,769 SEQ ID NO: 7 |
| AAV) | | |
| BAAV (bovine | 523 | U.S. Pat. No. 9,193,769 SEQ ID NO: 9 |
| AAV) | | |
| BNP61 AAV | 524 | US20150238550 SEQ ID NO: 1 |
| BNP61 AAV | 525 | US20150238550 SEQ ID NO: 2 |
| BNP62 AAV | 526 | US20150238550 SEQ ID NO: 3 |
| BNP63 AAV | 527 | US20150238550 SEQ ID NO: 4 |
| caprine AAV | 528 | U.S. Pat. No. 7,427,396 SEQ ID NO: 3 |
| caprine AAV | 529 | U.S. Pat. No. 7,427,396 SEQ ID NO: 4 |
| true type AAV | 530 | WO2015121501 SEQ ID NO: 2 |
| (ttAAV) | | |
| AAAV (Avian AAV) | 531 | U.S. Pat. No. 9,238,800 SEQ ID NO: 12 |
| AAAV (Avian AAV) | 532 | U.S. Pat. No. 9,238,800 SEQ ID NO: 2 |
| AAAV (Avian AAV) | 533 | U.S. Pat. No. 9,238,800 SEQ ID NO: 6 |
| AAAV (Avian AAV) | 534 | U.S. Pat. No. 9,238,800 SEQ ID NO: 4 |
| AAAV (Avian AAV) | 535 | U.S. Pat. No. 9,238,800 SEQ ID NO: 8 |
| AAAV (Avian AAV) | 536 | U.S. Pat. No. 9,238,800 SEQ ID NO: 14 |
| AAAV (Avian AAV) | 537 | U.S. Pat. No. 9,238,800 SEQ ID NO: 10 |
| AAAV (Avian AAV) | 538 | U.S. Pat. No. 9,238,800 SEQ ID NO: 15 |
| AAAV (Avian AAV) | 539 | U.S. Pat. No. 9,238,800 SEQ ID NO: 5 |
| AAAV (Avian AAV) | 540 | U.S. Pat. No. 9,238,800 SEQ ID NO: 9 |
| AAAV (Avian AAV) | 541 | U.S. Pat. No. 9,238,800 SEQ ID NO: 3 |
| AAAV (Avian AAV) | 542 | U.S. Pat. No. 9,238,800 SEQ ID NO: 7 |
| AAAV (Avian AAV) | 543 | U.S. Pat. No. 9,238,800 SEQ ID NO: 11 |
| AAAV (Avian AAV) | 544 | U.S. Pat. No. 9,238,800 SEQ ID NO: 13 |
| AAAV (Avian AAV) | 545 | U.S. Pat. No. 9,238,800 SEQ ID NO: 1 |
| AAV Shuffle 100-1 | 546 | US20160017295 SEQ ID NO: 23 |
| AAV Shuffle 100-1 | 547 | US20160017295 SEQ ID NO: 11 |
| AAV Shuffle 100-2 | 548 | US20160017295 SEQ ID NO: 37 |
| AAV Shuffle 100-2 | 549 | US20160017295 SEQ ID NO: 29 |
| AAV Shuffle 100-3 | 550 | US20160017295 SEQ ID NO: 24 |
| AAV Shuffle 100-3 | 551 | US20160017295 SEQ ID NO: 12 |
| AAV Shuffle 100-7 | 552 | US20160017295 SEQ ID NO: 25 |
| AAV Shuffle 100-7 | 553 | US20160017295 SEQ ID NO: 13 |
| AAV Shuffle 10-2 | 554 | US20160017295 SEQ ID NO: 34 |
| AAV Shuffle 10-2 | 555 | US20160017295 SEQ ID NO: 26 |
| AAV Shuffle 10-6 | 556 | US20160017295 SEQ ID NO: 35 |
| AAV Shuffle 10-6 | 557 | US20160017295 SEQ ID NO: 27 |
| AAV Shuffle 10-8 | 558 | US20160017295 SEQ ID NO: 36 |
| AAV Shuffle 10-8 | 559 | US20160017295 SEQ ID NO: 28 |
| AAV SM 100-10 | 560 | US20160017295 SEQ ID NO: 41 |
| AAV SM 100-10 | 561 | US20160017295 SEQ ID NO: 33 |
| AAV SM 100-3 | 562 | US20160017295 SEQ ID NO: 40 |
| AAV SM 100-3 | 563 | US20160017295 SEQ ID NO: 32 |
| AAV SM 10-1 | 564 | US20160017295 SEQ ID NO: 38 |
| AAV SM 10-1 | 565 | US20160017295 SEQ ID NO: 30 |
| AAV SM 10-2 | 566 | US20160017295 SEQ ID NO: 10 |
| AAV SM 10-2 | 567 | US20160017295 SEQ ID NO: 22 |
| AAV SM 10-8 | 568 | US20160017295 SEQ ID NO: 39 |
| AAV SM 10-8 | 569 | US20160017295 SEQ ID NO: 31 |

[0174] Each of the patents, applications and/or publications listed in Table 1 are hereby incorporated by reference in their entirety.

[0175] In one embodiment, the AAV serotype may be engineered to comprise at least one AAV capsid CD8+ T-cell epitope. Hui et al. (Molecular Therapy—Methods & Clinical Development (2015) 2, 15029 doi:10.1038/mtm.2015.29; the contents of which are herein incorporated by reference in its entirety) identified AAV capsid-specific CD8+ T-cell epitopes for AAV1 and AAV2 (see e.g., Table 2 in the publication). As a non-limiting example, the capsid-specific CD8+ T-cell epitope may be for an AAV2 serotype. As a non-limiting example, the capsid-specific CD8+ T-cell epitope may be for an AAV1 serotype.

[0176] In one embodiment, peptides for inclusion in an AAV serotype may be identified using the methods described by Hui et al. (Molecular Therapy—Methods & Clinical Development (2015) 2, 15029 doi:10.1038/mtm.2015.29; the contents of which are herein incorporated by reference in its entirety). As a non-limiting example, the procedure includes isolating human splenocytes, restimulating the splenocytes in vitro using individual peptides spanning the amino acid sequence of the AAV capsid protein, IFN-gamma ELISpot with the individual peptides used for the in vitro restimulation, bioinformatics analysis to determine the HLA restriction of 15-mers identified by IFN-gamma ELISpot, identification of candidate reactive 9-mer epitopes for a given HLA allele, synthesis candidate 9-mers, second IFN-gamma ELISpot screening of splenocytes from subjects carrying the HLA alleles to which identified AAV epitopes are predicted to bind, determine the AAV capsid-reactive CD8+ T cell epitopes and determine the frequency of subjects reacting to a given AAV epitope.

[0177] In one embodiment, peptides for inclusion in an AAV serotype may be identified by isolating human splenocytes, restimulating the splenocytes in vitro using individual peptides spanning the amino acid sequence of the AAV capsid protein, IFN-gamma ELISpot with the individual peptides used for the in vitro restimulation, bioinformatics analysis to determine the given allele restriction of 15-mers identified by IFN-gamma ELISpot, identification of candidate reactive 9-mer epitopes for a given allele, synthesis candidate 9-mers, second IFN-gamma ELISpot screening of splenocytes from subjects carrying the specific alleles to which identified AAV epitopes are predicted to bind, determine the AAV capsid-reactive CD8+ T cell epitopes and determine the frequency of subjects reacting to a given AAV epitope.

[0178] AAV vectors comprising the nucleic acid sequence for the siRNA molecules may be prepared or derived from various serotypes of AAVs, including, but not limited to, AAV1, AAV2, AAV3, AAV4, AAV5, AAV6, AAV7, AAV8, AAV9, AAV9.47, AAV9(hu14), AAV10, AAV11, AAV12, AAVrh8, AAVrh10, AAV-DJ8 and AAV-DJ. In some cases, different serotypes of AAVs may be mixed together or with other types of viruses to produce chimeric AAV vectors. As a non-limiting example, the AAV vector is derived from the AAV9 serotype.

[0179] In one embodiment, AAV particles of the present invention may comprise capsid proteins having sequences of SEQ ID NOs: 1 and 3, which have increased tropism to the brain, of International Publication No. WO2014160092, the content of which is incorporated herein by reference in its entirety.

[0180] In one embodiment, AAV particles of the present invention may comprise capsid proteins which may target to oligodendrocytes in the central nervous system. The capsid proteins may comprise AAV capsid coding sequence of SEQ ID NO: 1 or AAV capsid proteins comprising amino acid sequences of SEQ ID NOs: 2 to 4 of International Publication No. WO2014052789, the content of which is herein incorporated by reference in its entirety.

[0181] In one embodiment, AAV particles of the present invention may comprise capsid proteins having increased capacity to cross the blood-brain barrier in CNS as disclosed in U.S. Pat. No. 8,927,514, the content of which is incorporated herein by reference in its entirety. The amino acid sequences and nucleic acid sequences of such capsid proteins may include, but are not limited to, SEQ ID NOs: 2-17 and SEQ ID NOs: 25-33, respectively, of U.S. Pat. No. 8,927,514.

[0182] In some embodiments, AAV particles of the present invention may comprise AAV2 capsid proteins or variants thereof. AAV particles with AAV2 capsid proteins have been shown to deliver genes to neurons effectively in the brain, retina and spinal cord. In one embodiment, AAV2 capsid proteins may be further modified such as addition of a targeting peptide to the capsid proteins that targets an AAV particle to brain vascular endothelium as disclosed in U.S. Pat. Nos. 6,691,948 and 8,299,215, the contents of each of which are herein incorporated by reference in their entirety. Such AAV particles may be used to deliver a functional payload of interest to treat a brain disease such as mucopolysaccharide (MPS).

[0183] In some embodiments, AAV particles of the present invention may comprise AAV5 capsid proteins or variants thereof. AAV particles with AAV5 capsid proteins can transduce neurons in various regions of the CNS, including the cortex, the hippocampus (HPC), cerebellum, substantia nigra (SN), striatum, globus pallidus, and spinal cord (Burger C et al., Mol Ther., 2004, 10(2): 302-317; Liu G et al., Mol Ther. 2007, 15(2): 242-247; and Colle M et al., Hum, Mol. Genet. 2010, 19(1): 147-158). In one embodiment, AAV particles having AAV5 capsid proteins with increased transduction to cells in CNS may be those particles from U.S. Pat. No. 7,056,502, the content of which is incorporated herein by reference in its entirety.

[0184] In some embodiments, AAV particles of the present invention may comprise AAV6 capsid proteins or variants thereof. Recombinant AAV6 serotype can target motor neurons in the spinal cord by Intracerebroventricular (ICV) injection (Dirren E et al., Hum Gene Ther., 2014, 25(2): 109-120). In addition, a study from San Sebastian et al indicated that AAV6 serotype can be retrogradely transported from terminals to neuronal cell bodies in the rat brain (San Sebastian et al, Gen Ther., 2014, 20(12): 1178-1183).

[0185] In some embodiments, AAV particles of the present invention may comprise AAV8 capsid proteins or variants thereof. AAV particles with AAV8 capsid proteins can transduce neurons, for example in hippocampus (Klein R L et al., Mol Ther., 2006, 13(3): 517-527). In one embodiment, AAV8 capsid proteins may comprise the amino acid sequence of SEQ ID NO: 2 of U.S. Pat. No. 8,318,480, the content of which is herein incorporated by reference in its entirety.

[0186] In some embodiments, AAV particles of the present invention may comprise AAV9 capsid proteins or variants thereof. AAV9 capsid serotype mediated gene delivery has been observed in the brain with efficient and long-term expression of transgene after intraparenchymal injections to the CNS (Klein R L et al., Eur J Neurosci., 2008, 27: 1615-1625). AAV9 serotype can produce robust and wide-scale neuronal transduction throughout the CNS after a peripheral, systemic (e.g., intravenous) administration in neonatal subjects (Foust K D et al., Nat. Biotechnol., 2009, 27: 59-65; and Duque S et al, Mol Ther., 2009, 17: 1187-1196). Intrathecal (intra-cisterna magna routes) administration of AAV9 serotypes can also produce widespread spinal expression. In one embodiment, AAV9 serotype may comprise an AAV capsid protein having the amino acid sequence of SEQ ID NO: 2 of U.S. Pat. No. 7,198,951, the content of which is incorporated herein by reference in its entirety. In another aspect, AAV9 serotype may comprise VP1 capsid proteins of SEQ ID NOs: 2, 4 or 6 in which at least one of surface-exposed tyrosine residues in the amino acid sequence is substituted with another amino acid residue, as disclosed in US patent publication No. US20130224836, the content of which is incorporated herein by reference in its entirety.

[0187] In some embodiments, AAV particles of the present invention may comprise AAVrh10 capsid proteins or variants thereof. AAV particles comprising AAVrh10 capsid proteins can target neurons, other cells as well, in the spinal cord after intrathecal (IT) administration. In one embodiment, AAVrh10 capsid proteins may comprise the amino acid sequence of SEQ ID NO: 81 of EP patent NO: 2341068.

[0188] In some embodiments, AAV of the present invention may comprise AAVDJ capsid proteins, AAVDJ/8 capsid proteins, or variants thereof. Holehonnur et al showed that AAVDJ/8 serotype can target neurons within the Basal and Lateral Amygdala (BLA) (Holennur R et al., BMC Neurosci, 2014, Feb. 18:15:28). In one embodiment, AAVDJ capsid proteins and/or AAVDJ/8 capsid proteins may comprise an amino acid sequence comprising a first region that is derived from a first AAV serotype (e.g., AAV2), a second region that is derived from a second AAV serotype (e.g., AAV8), and a third region that is derived from a third AAV serotype (e.g., AAV9), wherein the first, second and third region may include any amino acid sequences that are disclosed in this description.

[0189] In some embodiment, AAV particles produced according to the present invention may comprise single stranded DNA viral genomes (ssAAVs) or self-complementary AAV genomes (scAAVs). scAAV genomes contain both DNA strands which anneal together to form double stranded DNA. By skipping second strand synthesis, scAAVs allow for rapid expression in the cell.

[0190] In one embodiment, AAV particles of the present invention may comprise capsid proteins that have been shown to or are known to transduce dorsal root ganglions (DRGs).

[0191] In one embodiment, AAV particles of the present invention may comprise capsid proteins that have been shown or are known to transduce motor neurons.

[0192] In one embodiment, the AAV particles comprise a self-complementary (SC) vector genome.

[0193] In one embodiment, the AAV particles comprise a single stranded (SS) genome.

[0194] In one embodiment, an AAV particle comprising a self-complementary (sc) vector may be used to yield higher expression than an AAV particle comprising a corresponding single stranded vector genome.

[0195] In one embodiment, the serotype of the AAV particles described herein may depend on the desired distribution, transduction efficiency and cellular targeting required. As described by Sorrentino et al. (comprehensive map of CNS transduction by eight adeno-associated virus serotypes upon cerebrospinal fluid administration in pigs, Molecular Therapy accepted article preview online 7 Dec. 2015; doi:10.1038/mt.2015.212; the contents of which are herein incorporated by reference in its entirety), AAV serotypes provided different distributions, transduction efficiencies and cellular targeting. In order to provide the desired efficacy, the AAV serotype needs to be selected that best matches not only the cells to be targeted but also the desired transduction efficiency and distribution.

### Formulation and Delivery

### Formulation

[0196] Formulations of the present invention can include, without limitation, saline, liposomes, lipid nanoparticles, polymers, peptides, proteins, cells transfected with viral vectors (e.g., for transplantation into a subject) and combinations thereof.

[0197] Formulations of the pharmaceutical compositions described herein may be prepared by any method known or hereafter developed in the art of pharmacology. In general, such preparatory methods include the step of bringing the active ingredient into association with an excipient and/or one or more other accessory ingredients, and then, if necessary and/or desirable, dividing, shaping and/or packaging the product into a desired single- or multi-dose unit.

[0198] A pharmaceutical composition in accordance with the present disclosure may be prepared, packaged, and/or sold in bulk, as a single unit dose, and/or as a plurality of single unit doses. As used herein, a “unit dose” refers to a discrete amount of the pharmaceutical composition comprising a predetermined amount of the active ingredient. As used herein, a “single unit dose” is a dose of any therapeutic administered in one dose/at one time/single route/single point of contact, i.e., single administration event. As used herein, a “total daily dose” is an amount given or prescribed in 24 hour period. It may be administered as a single unit dose. The amount of the active ingredient is generally equal to the dosage of the active ingredient which would be administered to a subject and/or a convenient fraction of such a dosage such as, for example, one-half or one-third of such a dosage.

[0199] Relative amounts of the active ingredient (e.g. AAV particle), the pharmaceutically acceptable excipient, and/or any additional ingredients in a pharmaceutical composition in accordance with the present disclosure may vary, depending upon the identity, size, and/or condition of the subject being treated and further depending upon the route by which the composition is to be administered. For example, the composition may comprise between 0.1% and 99% (w/w) of the active ingredient. By way of example, the composition may comprise between 0.1% and 100%, e.g., between 0.5 and 50%, between 1-30%, between 5-80%, at least 80% (w/w) active ingredient.

[0200] In one embodiment, the viral particles (e.g., AAV particles) of the invention may be formulated in buffer only or in a formulation described herein.

[0201] In one embodiment, the AAV particles of the invention may be formulated in PBS with 0.001% of pluronic acid (F-68) at a pH of about 7.0.

[0202] In some embodiments, the AAV particle formulations described herein may contain a nucleic acid encoding at least one payload. As a non-limiting example, the formulations may contain a nucleic acid encoding 1, 2, 3, 4 or 5 payloads.

[0203] In one embodiment, factors which may influence drug distribution such as, but not limited to, catheter location (e.g., cervical or lumbar, and one or multi-site delivery), dosing regimen (e.g., continuous or bolus, and dose including rate, volume, and duration) formulation (e.g., baricity, temperature, etc.), spinal anatomy and pathology of a subject (e.g., scoliosis) and spatial orientation of a subject (e.g., horizontal or vertical) is evaluated prior to delivery of the AAV particles described herein.

[0204] The formulations of the invention can include one or more excipients, each in an amount that together increases the stability of the AAV particle, increases cell transfection or transduction by the viral particle, increases the expression of viral particle encoded protein, and/or alters the release profile of AAV particle encoded proteins. In some embodiments, a pharmaceutically acceptable excipient may be at least 95%, at least 96%, at least 97%, at least 98%, at least 99%, or 100% pure. In some embodiments, an excipient is approved for use for humans and for veterinary use. In some embodiments, an excipient may be approved by United States Food and Drug Administration. In some embodiments, an excipient may be of pharmaceutical grade. In some embodiments, an excipient may meet the standards of the United States Pharmacopoeia (USP), the European Pharmacopoeia (EP), the British Pharmacopoeia, and/or the International Pharmacopoeia.

[0205] Excipients, which, as used herein, includes, but is not limited to, any and all solvents, dispersion media, diluents, or other liquid vehicles, dispersion or suspension aids, surface active agents, isotonic agents, thickening or emulsifying agents, preservatives, and the like, as suited to the particular dosage form desired. Various excipients for formulating pharmaceutical compositions and techniques for preparing the composition are known in the art (see Remington: The Science and Practice of Pharmacy, 21^{st} Edition, A. R. Gennaro, Lippincott, Williams & Wilkins, Baltimore, Md., 2006; incorporated herein by reference in its entirety). The use of a conventional excipient medium may be contemplated within the scope of the present disclosure, except insofar as any conventional excipient medium may be incompatible with a substance or its derivatives, such as by producing any undesirable biological effect or otherwise interacting in a deleterious manner with any other component(s) of the pharmaceutical composition.

[0206] In one embodiment, the AAV particles may be formulated in a formulation which has been optimized to ensure optimal drug distribution in the central nervous system or a region or component of the central nervous system. As a non-limiting example, the baricity and/or osmolarity may be adjusted to ensure optimal drug distribution.

[0207] In one embodiment, the AAV particle formulation may include at least one inactive ingredient.

[0208] Although the descriptions of pharmaceutical compositions, e.g., AAV comprising a payload to be delivered, provided herein are principally directed to pharmaceutical compositions which are suitable for administration to humans, it will be understood by the skilled artisan that such compositions are generally suitable for administration to any other animal, e.g., to non-human animals, e.g. non-human mammals. Modification of pharmaceutical compositions suitable for administration to humans in order to render the compositions suitable for administration to various animals is well understood, and the ordinarily skilled veterinary pharmacologist can design and/or perform such modification with merely ordinary, if any, experimentation. Subjects to which administration of the pharmaceutical compositions is contemplated include, but are not limited to, humans and/or other primates; mammals, including commercially relevant mammals such as cattle, pigs, horses, sheep, cats, dogs, mice, and/or rats; and/or birds, including commercially relevant birds such as poultry, chickens, ducks, geese, and/or turkeys.

[0209] In some embodiments, compositions are administered to humans, human patients or subjects. For the purposes of the present disclosure, the phrase “active ingredient” generally refers either to the viral particle carrying the payload or to the payload delivered by the viral particle as described herein.

### Inactive Ingredients

[0210] In some embodiments, AAV formulations may comprise at least one excipient which is an inactive ingredient. As used herein, the term “inactive ingredient” refers to one or more agents that do not contribute to the activity of the pharmaceutical composition included in formulations. In some embodiments, all, none or some of the inactive ingredients which may be used in the formulations of the present invention may be approved by the US Food and Drug Administration (FDA).

[0211] Formulations of AAV particles disclosed herein may include cations or anions. In one embodiment, the formulations include metal cations such as, but not limited to, Zn2+, Ca2+, Cu2+, Mg+, MgSO₄, and combinations thereof. As a non-limiting example, MgSO₄ may be used to increase the ionic strength of a formulation.

### Composition pH

[0212] In one embodiment, formulations of AAV particles comprises a buffered composition of between pH 4.5 and 8.0. As a non-limiting example, the AAV particles may be delivered to the cells of the central nervous system (e.g., parenchyma).

[0213] In some embodiments, the formulation of AAV particles may comprise a buffered composition of about pH 3.0, 3.1, 3.2, 3.3, 3.4, 3.5, 3.6, 3.7, 3.8, 3.9, 4.0, 4.1, 4.2, 4.3, 4.4, 4.5, 4.6, 4.7, 4.8, 4.9, 5.0, 5.1, 5.2, 5.3, 5.4, 5.5, 5.6, 5.7, 5.8, 5.9, 6.0, 6.1, 6.2, 6.3, 6.4, 6.5, 6.6, 6.7, 6.8, 6.9, 7.0, 7.1, 7.2, 7.3, 7.4, 7.5, 7.6, 7.7, 7.8, 7.9, or 8.0.

[0214] In one embodiment, the formulation of AAV particles comprises a buffered composition of pH 7.4, which is considered physiological pH.

[0215] In one embodiment, the formulation of AAV particles comprises a buffered composition of pH 7.0.

[0216] In one embodiment, the formulation has a relatively very low buffer strength, or ability to hold pH, which may allow the infused composition of AAV particles to quickly adjust to the prevailing physiological pH of the CSF (˜pH 7.4).

### Composition Baricity

[0217] It is known in the art that CSF comprises a baricity, or density of solution, of approximately 1 g/mL at 37° C. In one embodiment, delivery of AAV particles to cells of the central nervous system (e.g., parenchyma) comprises an isobaric composition wherein the baricity of the composition at 37° C. is approximately 1 g/mL. In one embodiment, delivery comprises a hypobaric composition wherein the baricity of the composition at 37° C. is less than 1 g/mL. In one embodiment, delivery comprises a hyperbaric composition wherein the baricity of the composition at 37° C. is greater than 1 g/mL (e.g., greater than 1.001 g/mL).

[0218] In one embodiment, the composition is a hyperbaric composition comprising AAV particles and a sugar such as, but not limited to, a sugar approved by the FDA (US Food and Drug Administration) for delivery. In one embodiment, delivery comprises a hyperbaric composition wherein the baricity of the composition at 37° C. is increased by addition of 5.0%, 5.1%, 5.2%, 5.3%, 5.4%, 5.5%, 5.6%, 5.7%, 5.8%, 5.9%, 6.0%, 6.1%, 6.2%, 6.3%, 6.4%, 6.5%, 6.6%, 6.7%, 6.8%, 6.9%, 7.0%, 7.1%, 7.2%, 7.3%, 7.4%, 7.5%, 7.6%, 7.7%, 7.8%, 7.9%, or 8.0% sugar. As a non-limiting example, the sugar may be dextrose, mannitol or sorbitol.

[0219] In one embodiment, the composition is a hyperbaric composition wherein the baricity of the composition at 37° C. is increased by addition of approximately 5% to 8% dextrose. In one embodiment, delivery comprises a hyperbaric composition wherein the baricity of the composition at 37° C. is increased by addition of 5.0%, 5.1%, 5.2%, 5.3%, 5.4%, 5.5%, 5.6%, 5.7%, 5.8%, 5.9%, 6.0%, 6.1%, 6.2%, 6.3%, 6.4%, 6.5%, 6.6%, 6.7%, 6.8%, 6.9%, 7.0%, 7.1%, 7.2%, 7.3%, 7.4%, 7.5%, 7.6%, 7.7%, 7.8%, 7.9%, or 8.0% dextrose.

[0220] In one embodiment, the composition is a hyperbaric composition wherein the baricity of the composition at 37° C. is increased by addition of approximately 4% to 8% mannitol. In one embodiment, delivery comprises a hyperbaric composition wherein the baricity of the composition at 37° C. is increased by addition of 4.0%, 4.1%, 4.2%, 4.3%, 4.4%, 4.5%, 4.6%, 4.7%, 4.8%, 4.9%, 5.0%5.1%5.2%5, 5.1%, 5.2%, 5.3%, 5.4%, 5.5%, 5.6%, 5.7%, 5.8%, 5.9%, 6.0%, 6.1%, 6.2%, 6.3%, 6.4%, 6.5%, 6.6%, 6.7%, 6.8%, 6.9%, 7.0%, 7.1%, 7.2%, 7.3%, 7.4%, 7.5%, 7.6%, 7.7%, 7.8%, 7.9%, or 8.0% mannitol.

[0221] In one embodiment, the composition is a hyperbaric composition wherein the baricity of the composition at 37° C. is increased by addition of approximately 4% to 8% sorbitol. In one embodiment, delivery comprises a hyperbaric composition wherein the baricity of the composition at 37° C. is increased by addition of 4.0%, 4.1%, 4.2%, 4.3%, 4.4%, 4.5%, 4.6%, 4.7%, 4.8%, 4.9%, 5.0%, 5.1%, 5.2%, 5.3%, 5.4%, 5.5%, 5.6%, 5.7%, 5.8%, 5.9%, 6.0%, 6.1%, 6.2%, 6.3%, 6.4%, 6.5%, 6.6%, 6.7%, 6.8%, 6.9%, 7.0%, 7.1%, 7.2%, 7.3%, 7.4%, 7.5%, 7.6%, 7.7%, 7.8%, 7.9%, or 8.0% sorbitol.

### Composition Osmolarity

[0222] In one embodiment, delivery of AAV particles to cells of the central nervous system (e.g., parenchyma) comprises co-administration of agents that increase serum osmolarity. As used herein, “co-administered” means the administration of two or more components. Co-administration refers to the administration of two or more components simultaneously or with a time lapse between administration such as 1 second, 5 seconds, 10 seconds, 15 seconds, 30 seconds, 45 seconds, 1 minute, 2 minutes, 3 minutes, 4 minutes, 5 minutes, 6 minutes, 7 minutes, 8 minutes, 9 minutes, 10 minutes, 11 minutes, 12 minutes, 13 minutes, 14 minutes, 15 minutes, 16 minutes, 17 minutes, 18 minutes, 19 minutes, 20 minutes, 21 minutes, 22 minutes, 23 minutes, 24 minutes, 25 minutes, 26 minutes, 27 minutes, 28 minutes, 29 minutes, 30 minutes, 31 minutes, 32 minutes, 33 minutes, 34 minutes, 35 minutes, 36 minutes, 37 minutes, 38 minutes, 39 minutes, 40 minutes, 41 minutes, 42 minutes, 43 minutes, 44 minutes, 45 minutes, 46 minutes, 47 minutes, 48 minutes, 49 minutes, 50 minutes, 51 minutes, 52 minutes, 53 minutes, 54 minutes, 55 minutes, 56 minutes, 57 minutes, 58 minutes, 59 minutes, 1 hour, 1.5 hours, 2 hours, 2.5 hours, 3 hours, 4 hours, 5 hours, 6 hours, 7 hours, 8 hours, 9 hours, 10 hours, 11 hours, 12 hours, 13 hours, 14 hours, 15 hours, 16 hours, 17 hours, 18 hours, 19 hours, 20 hours, 21 hours, 22 hours, 23 hours, 1 day, 1.5 days, 2 days, or more than 3 days.

[0223] In one embodiment, delivery comprises co-administration of mannitol. In one embodiment, delivery comprises co-administration of approximately 0.25 to 1.0 g/kg intravenous mannitol. In one embodiment, delivery comprises co-administration of 0.25, 0.26, 0.27, 0.28, 0.29, 0.30, 0.31, 0.32, 0.33, 0.34, 0.35, 0.36, 0.37, 0.38, 0.39, 0.40, 0.41, 0.42, 0.43, 0.44, 0.45, 0.46, 0.47, 0.48, 0.49, 0.50, 0.51, 0.52, 0.53, 0.54, 0.55, 0.56, 0.57, 0.58, 0.59, 0.60, 0.61, 0.62, 0.63, 0.64, 0.65, 0.66, 0.67, 0.68, 0.69, 0.70, 0.71, 0.72, 0.73, 0.74, 0.75, 0.76, 0.77, 0.78, 0.79, 0.80, 0.81, 0.82, 0.83, 0.84, 0.85, 0.86, 0.87, 0.88, 0.89, 0.90, 0.91, 0.92, 0.93, 0.94, 0.95, 0.96, 0.97, 0.98, 0.99, 1.00 g/kg intravenous mannitol.

### Composition Temperature

[0224] In one embodiment, delivery of AAV particles to cells of the central nervous system (e.g., parenchyma) comprises a composition wherein the temperature of the composition is 37° C. In one embodiment, delivery comprises a composition wherein the temperature of the composition is between approximately 20° C. and 26° C. In one embodiment, delivery comprises a composition wherein the temperature of the composition is approximately 20.0° C., 20.1° C., 20.2° C., 20.3° C., 20.4° C., 20.5° C., 20.6° C., 20.7° C., 20.8° C., 20.9° C., 21.0° C., 21.1° C., 21.2° C., 21.3° C., 21.4° C., 21.5° C., 21.6° C., 21.7° C., 21.8° C., 21.9° C., 22.0° C., 22.1° C., 22.2° C., 22.3° C., 22.4° C., 22.5° C., 22.6° C., 22.7° C., 22.8° C., 22.9° C., 23.0° C., 23.1° C., 23.2° C., 23.3° C., 23.4° C., 23.5° C., 23.6° C., 23.7° C., 23.8° C., 23.9° C., 24.0° C., 24.1° C., 24.2° C., 24.3° C., 24.4° C., 24.5° C., 24.6° C., 24.7° C., 24.8° C., 24.9° C., 25.0° C., 25.1° C., 25.2° C., 25.3° C., 25.4° C., 25.5° C., 25.6° C., 25.7° C., 25.8° C., 25.9° C., or 26.0° C.

### Drug Physiochemical & Biochemical Properties

[0225] In one embodiment, delivery of AAV particles to cells of the central nervous system (e.g., parenchyma) comprises a composition wherein the AAV capsid is hydrophilic. In one embodiment, delivery comprises a composition wherein the AAV capsid is lipophilic.

[0226] In one embodiment, delivery of AAV particles to cells of the central nervous system (e.g., parenchyma) comprises a composition wherein the AAV capsid targets a specific receptor. In one embodiment, delivery of AAV particles to cells of the central nervous system (e.g., parenchyma) comprises a composition wherein the AAV capsid further comprises a specific ligand.

[0227] In one embodiment, delivery of AAV particles to cells of the central nervous system (e.g., parenchyma) comprises a composition wherein the AAV genome further comprises a cell specific promoter region. In one embodiment, delivery comprises a composition wherein the AAV genome further comprises a ubiquitous promoter region.

### Administration and Delivery

[0228] The AAV particles of the present invention may be administered by any route which results in a therapeutically effective outcome. These include, but are not limited to epidural, peridural, subdural (in particular delivery of AAV over one or more targeted regions of the neocortex), intracerebral (into the cerebrum), intracerebroventricular (into the cerebral ventricles), intrathecal (into the spinal canal or within the cerebrospinal fluid at any level of the cerebrospinal axis), intradiscal (within a disc), intradural (within or beneath the dura), intraspinal (within the vertebral column), caudal block, diagnostic, nerve block, or spinal. In specific embodiments, compositions may be administered in a way which allows them cross the blood-brain barrier, vascular barrier, or other epithelial barrier.

[0229] In one embodiment, the AAV particles may be delivered by systemic delivery.

[0230] In one embodiment, the AAV particles may be delivered by direct injection into the brain. As a non-limiting example, the brain delivery may be by intrastriatal administration.

[0231] In one embodiment, the AAV particles may be delivered by a route to bypass the liver metabolism.

[0232] In one embodiment, the AAV particles may be delivered to reduce degradation of the AAV particles and/or degradation of the formulation in the blood.

[0233] In one embodiment, the AAV particles may be delivered to bypass anatomical blockages such as, but not limited to the blood brain barrier.

[0234] In one embodiment, the AAV particles may be formulated and delivered to a subject by a route which increases the speed of drug effect as compared to oral delivery.

[0235] In one embodiment, the AAV particles may be delivered to a subject via a single site of administration.

[0236] In one embodiment, the AAV particles may be delivered to a subject via a multi-site route of administration. For example, a subject may be administered the AAV particles at 2, 3, 4, 5 or more than 5 sites.

[0237] In one embodiment, a subject may be delivered the AAV particles herein using two or more delivery routes.

[0238] In one embodiment, the AAV particles may be delivered using convection-enhanced delivery (CED) which is a parenchymal infusion that uses a pressure gradient at a cannula tip within a target structure to deliver a large flow of AAV particles within the interstitial fluid space.

[0239] In one embodiment, the AAV particles may be delivered using CED in combination with a tracer visible with magnetic resonance (MR) such as, but not limited to, Gadoteridol. As shown by Bankiewicz et al. (J Control Release 2016 Feb. 27 Epub), the combination of CED and Gadoteridol enhances the accuracy and effectiveness of AAV delivery as it provides a visualization of the infusion in real-time.

[0240] In one embodiment, the AAV particles may be delivered to a subject who is using or who has used a treatment stimulator for brain diseases. Non-limiting examples include treatment stimulators from THERATAXIS™ and the treatment stimulators described in International Patent Publication No. WO2008144232, the contents of which are herein incorporated by reference in its entirety.

[0241] In one embodiment, the delivery of the AAV particles in a subject may be determined and/or predicted using the prediction methods described in International Patent Publication No. WO2001085230, the contents of which are herein incorporated by reference in its entirety.

[0242] In one embodiment, a subject may be imaged prior to, during and/or after administration of the AAV particles. The imaging method may be a method known in the art and/or described herein. As a non-limiting example, the imaging method which may be used to classify brain tissue includes the medical image processing method described in U.S. Pat. Nos. 7,848,543, 9,101,282 and EP Application No. EP1768041, the contents of each of which are herein incorporated by reference in their entireties. As yet another non-limiting example, the physiological states and the effects of treatment of a neurological disease in a subject may be tracked using the methods described in US Patent Publication No. US20090024181, the contents of which are herein incorporated by reference in its entirety.

[0243] In one embodiment, the flow of a composition comprising the AAV particles may be controlled using acoustic waveform outside the target area. Non-limiting examples of devices, methods and controls for using sonic guidance to control molecules is described in US Patent Application No. US20120215157, U.S. Pat. No. 8,545,405, International Patent Publication Nos. WO2010096495 and WO2010080701, the contents of each of which are herein incorporated by reference in their entireties.

[0244] In one embodiment, the flow of a composition comprising the AAV particles may be modeled prior to administration using the methods and apparatus described in U.S. Pat. Nos. 6,549,803 and 8,406,850 and US Patent Application No. US20080292160, the content of each of which is incorporated by reference in their entireties. As a non-limiting example, the physiological parameters defining edema induced upon infusion of fluid from an intraparenchymally placed catheter may be estimated using the methods described in U.S. Pat. No. 8,406,850 and US Patent Application No. US20080292160, the contents of which is herein incorporated by reference in its entirety.

[0245] In one embodiment, the distribution of the AAV particles described herein may be evaluated using imaging technology from Therataxis and/or Brain Lab.

### Delivery to the CNS

[0246] In one embodiment, the AAV particles may be delivered to the central nervous system using any of the methods described herein.

[0247] Factors affecting delivery of payloads by parvovirus, e.g., AAV particles to cells of the central nervous system (e.g., parenchyma) as provided by the invention may include, but are not limited to, infusion parameters and devices, spatial orientation of the subject, composition physiochemical properties, and viral physiochemical and biochemical properties.

[0248] In one embodiment, the delivery method and duration is chosen to provide broad transduction in the spinal cord. As a non-limiting example, intrathecal delivery is used to provide broad transduction along the rostral-caudal length of the spinal cord. As another non-limiting example, multi-site infusions provide a more uniform transduction along the rostral-caudal length of the spinal cord. As yet another non-limiting example, prolonged infusions provide a more uniform transduction along the rostral-caudal length of the spinal cord.

[0249] In one embodiment, delivery of payloads by adeno-associated virus (AAV) particles to the central nervous system (e.g., parenchyma) may be by prolonged delivery to the cerebrospinal fluid (CSF). CSF is produced by specialized ependymal cells that comprise the choroid plexus located in the ventricles of the brain. CSF produced within the brain then circulates and surrounds the central nervous system including the brain and spinal cord.

[0250] In one embodiment, the AAV particles described herein may be delivered by a method which allows even distribution of the AAV particles along the CNS taking into account cerebrospinal fluid (CSF) dynamics. CSF continually circulates around the central nervous system, including the ventricles of the brain and subarachnoid space that surrounds both the brain and spinal cord, while maintaining a homeostatic balance of production and reabsorption into the vascular system. The entire volume of CSF is replaced (CSF turnover (TO)) approximately four to six times per day or approximately once every four hours, though values for individuals may vary. Non-limiting examples of delivery to the CSF pathway include intrathecal (IT) and intracerebroventricular (ICV) administration.

[0251] In one embodiment, a subject may be delivered the AAV particles described herein to a region of the spinal cord which has been determined to have a higher CSF flow along the anterior aspect of the cord as compared to the flow along the entire cord.

[0252] In one embodiment, a subject may be delivered the AAV particles described herein to a region of the spinal cord which has been determined to have a higher CSF flow along the ventral aspect of the cord as compared to the flow along the entire cord.

[0253] In one embodiment, AAV particles are delivered taking into account the oscillating movement and vortexes of the CSF around the spinal cord. Vortexes are formed by the oscillating movement of the CSF around the cord and these individual vortices combine to form vortex arrays. The arrays combine to form fluid paths for movement of the AAV particles along the spinal cord.

[0254] In one embodiment, the CSF flow dynamics of a subject are evaluated prior to administration of the AAV particles described herein. As a non-limiting example, a subject is evaluated pre and post-catheter implant to determine the flow dynamics of the CSF and an imaging enhancer such as, but not limited to, gadoluminate may be used during the evaluation.

[0255] In one embodiment, the macrodistribution of the AAV particles described herein across the spinal cord and brain may be governed by CSF flow and/or dosing parameters such as, but not limited to, infusion rate.

[0256] In one embodiment, the microdistribution of the AAV particles described herein into tissue may be dependent on CSF flow, exposure time and amount of AAV with the tissue and the properties of the AAV particles.

[0257] In one embodiment, the fine distribution of the AAV particles described herein into cells may be a function of the biology of the AAV particle such as, but not limited to, receptor binding, retrograde transport and/or anterograde transport of the AAV particles.

### Intraparenchymal (IPa) Administration

[0258] In one embodiment, delivery of AAV particles to cells of the central nervous system is performed by intraparenchymal (IPa) administration. IPa administration delivers the AAV particles directly into the brain parenchyma.

[0259] In one embodiment, AAV particles may be delivered to a subject using IPa delivery in at least one location in the brain parenchyma. The location or locations may be located in the right brain, the left brain or both the right and left brain. As a non-limiting example, the location of the IPa delivery is in the right brain in the caudate and the putamen. As a non-limiting example, the location of the IPa delivery is in the left brain in the caudate and the putamen. As a non-limiting example, the location of the IPa delivery is in the right brain in the caudate and the putamen and in the left brain in the caudate and the putamen.

[0260] In one embodiment, AAV particles may be delivered to a subject using IPa delivery in the brain parenchyma in at least 1, 2, 3, 4, 5, 6, 7, 8, 9, 10 or more than 10 locations in the brain parenchyma. As a non-limiting example, the AAV particles may be delivered in the right brain in 3 sites. As a non-limiting example, the AAV particles may be delivered in the left brain in 3 sites. As a non-limiting example, the AAV particles may be delivered in the right brain in 3 sites and in the left brain in 3 sites.

[0261] In one embodiment, the AAV particles may be delivered to a subject using IPa delivery in 3 sites of the caudate and putamen in the right brain and 3 sites of the caudate and putamen in the left brain.

[0262] In one embodiment, the AAV particles may be delivered to a subject using IPa delivery in the caudate of the left brain.

[0263] In one embodiment, the AAV particles may be delivered to a subject using IPa delivery in the caudate of the right brain.

[0264] In one embodiment, the AAV particles may be delivered to a subject using IPa delivery in the putamen of the left brain.

[0265] In one embodiment, the AAV particles may be delivered to a subject using IPa delivery in the putamen of the right brain.

[0266] In one embodiment, the AAV particles may be delivered to a subject using IPa delivery to the caudate of the left brain and the caudate of the right brain.

[0267] In one embodiment, the AAV particles may be delivered to a subject using IPa delivery to the putamen of the left brain and the putamen of the right brain.

[0268] In one embodiment, the AAV particles may be delivered to a subject using IPa delivery to the caudate of the left brain and the putamen of the right brain.

[0269] In one embodiment, the AAV particles may be delivered to a subject using IPa delivery to the caudate of the right brain and the putamen of the left brain.

[0270] In one embodiment, intraparenchymal delivery of the AAV particles described herein may use convection enhanced delivery. While not wishing to be bound by theory, convection enhanced delivery uses sustained pressure (or convection) to push a drug solution through brain tissue causing the drug to infuse at a higher rate than it can diffuse away from the injection site.

[0271] In one embodiment, the volume of delivery of the AAV particles per site may be 1, 2, 3, 4, 5, 6, 7, 8, 9, 10, 11, 12, 13, 14, 15, 16, 17, 18, 19, 20, 21, 22, 23, 24, 25, 26, 27, 28, 29, 30, 31, 32, 33, 34, 35, 36, 37, 38, 39, 40, 41, 42, 43, 44, 45, 46, 47, 48, 49, 50, 51, 52, 53, 54, 55, 56, 57, 58, 59, 60 or more than 60 ul per site of administration. As a non-limiting example, the volume of delivery may be 30 ul per site of administration.

[0272] In one embodiment, the administration of the AAV particles to a subject provides coverage of the putamen of a subject (e.g., the left and/or right putamen). The administration of the AAV particles may provide at least 8%, 9%, 10%, 13%, 14%, 15%, 19%, 20%, 21%, 22%, 23%, 24%, 25%, 26%, 27%, 28%, 29%, 30%, 31%, 32%, 33%, 34%, 35%, 36%, 37%, 38%, 39%, 40%, 41%, 42%, 43%, 44%, 45%, 46%, 47%, 48%, 49%, 50%, 51%, 52%, 53%, 54%, 55%, 60%, 65%, 70%, 75%, 80%, 85%, 90%, 95% or more than 95% to the left and/or right putamen of a subject. As a non-limiting example, the coverage is at least 20%. As another non-limiting example, the coverage is at least 30%. As a non-limiting example, the coverage is at least 40%. The administration of the AAV particles may provide at least 8%, 9%, 10%, 13%, 14%, 15%, 19%, 20%, 21%, 22%, 23%, 24%, 25%, 26%, 27%, 28%, 29%, 30%, 31%, 32%, 33^{%}, 34%, 35%, 36%, 37%, 38%, 39%, 40%, 41%, 42%, 43%, 44%, 45%, 46%, 47%, 48%, 49%, 50%, 51%, 52%, 53%, 54%, 55%, 60%, 65%, 70%, 75%, 80%, 85%, 90%, 95% or more than 95% coverage of the surface area of the left and/or right putamen of a subject. As a non-limiting example, the total coverage is at least 20%. As another non-limiting example, the total coverage is at least 30%. As a non-limiting example, the total coverage is at least 40%. The administration of the AAV particles may provide 10-40%, 19-25%, 20-40%, 20-30%, 20-35%, 20-50%, 25-38%, 30-40%, 35-40%, 30-60%, 40-70%, 50-80% or 60-90% coverage to the left and/or right putamen of a subject or to the total surface area of the left and/or right putamen of a subject.

[0273] In one embodiment, the total dose of AAV particles delivered via IPa administration may be between about 1×10⁶ VG and about 1×10¹⁶ VG. In some embodiments, delivery may comprise a total dose of about 1×10⁶, 2×10⁶, 3×10⁶, 4×10⁶, 5×10⁶, 6×10⁶, 7×10⁶, 8×10⁶, 9×10⁶, 1×10⁷, 2×10⁷, 3×10⁷, 4×10⁷, 5×10⁷, 6×10⁷, 7×10⁷, 8×10⁷, 9×10⁷, 1×10⁸, 2×10⁸, 3×10⁸, 4×10⁸, 5×10⁸, 6×10⁸, 7×10⁸, 8×10⁸, 9×10⁸, 1×10⁹, 1.9×10⁹, 2×10⁹, 3×10⁹, 4×10⁹, 5×10⁹, 6×10⁹, 7×10⁹, 8×10⁹, 9×10⁹, 1×10¹⁰, 2×10¹⁰, 3×10¹⁰, 4×10¹⁰, 5×10¹⁰, 5.7×10¹⁰, 6×10¹⁰, 7×10¹⁰, 8×10¹⁰, 9×10¹⁰, 1×10¹¹, 1.1×10¹¹, 2×10¹¹, 2.5×10¹¹, 3×10¹¹, 3.4×10¹¹, 4×10¹¹, 5×10¹¹, 6×10¹¹, 7×10¹¹, 8×10¹¹, 9×10¹¹, 1×10¹², 2×10¹², 3×10¹², 4×10¹², 5×10¹², 6×10¹², 7×10¹², 8×10¹², 9×10¹², 1×10¹³, 2×10¹³ 3×10¹³, 4×10¹³, 5×10¹³, 6×10¹³, 7×10¹³, 8×10¹³, 9×10¹³, 1×10¹⁴, 2×10¹⁴, 3×10¹⁴, 4×10¹⁴, 5×10¹⁴ 6×10¹⁴, 7×10¹⁴, 8×10¹⁴, 9×10¹⁴, 1×10¹⁵, 2×10¹⁵, 3×10¹⁵, 4×10¹⁵, 5×10¹⁵, 6×10¹⁵, 7×10¹⁵, 8×10¹⁵, 9×10¹⁵, or 1×10¹⁶ VG.

[0274] In one embodiment, delivery of AAV particles via IPa delivery may comprise a composition concentration between about 1×10⁶ VG/mL and about 1×10¹⁶ VG/mL. In some embodiments, delivery may comprise a composition concentration of about 1×10⁶, 2×10⁶, 3×10⁶, 4×10⁶, 5×10⁶, 6×10⁶, 7×10⁶, 8×10⁶, 9×10⁶, 1×10⁷, 2×10⁷, 3×10⁷, 4×10⁷, 5×10⁷, 6×10⁷, 7×10⁷, 8×10⁷, 9×10⁷, 1×10⁸, 2×10⁸, 3×10⁸, 4×10⁸, 5×10⁸, 6×10⁸, 7×10⁸, 8×10⁸, 9×10⁸, 1×10⁹, 2×10⁹, 3×10⁹, 4×10⁹, 5×10⁹, 6×10⁹, 7×10⁹, 8×10⁹, 9×10⁹, 1×10¹⁰, 2×10¹⁰, 3×10¹⁰, 4×10¹⁰, 5×10¹⁰, 6×10¹⁰, 7×10¹⁰, 8×10¹⁰, 9×10¹⁰, 1×10¹¹, 2×10¹¹, 3×10¹¹, 4×10¹¹, 5×10¹¹, 6×10¹¹, 7×10¹¹, 8×10¹¹, 9×10¹¹, 1×10¹², 1.9×10¹², 2×10¹², 3×10¹², 4×10¹², 5×10¹², 6×10¹², 7×10¹², 8×10¹², 9×10¹², 1×10¹³, 2×10¹³, 3×10¹³, 4×10¹³, 5×10¹³, 6×10¹³, 7×10¹³, 8×10¹³, 9×10¹³, 1×10¹⁴, 2×10¹⁴, 3×10¹⁴, 4×10¹⁴, 5×10¹⁴ 6×10¹⁴, 7×10¹⁴, 8×10¹⁴, 9×10¹⁴, 1×10¹⁵, 2×10¹⁵, 3×10¹⁵, 4×10¹⁵, 5×10¹⁵, 6×10¹⁵, 7×10¹⁵, 8×10¹⁵, 9×10¹⁵, or 1×10¹⁶ VG/mL. In one embodiment, delivery comprises a composition concentration of 1.9×10¹² VG/mL.

[0275] In one embodiment, delivery of AAV particles via IPa delivery may comprise a dose per site of between about 1×10⁶ VG/site and about 1×10¹⁶ VG/site. In some embodiments, delivery may comprise a composition concentration of about 1×10⁶, 2×10⁶, 3×10⁶, 4×10⁶, 5×10⁶, 6×10⁶, 7×10⁶, 8×10⁶, 9×10⁶, 1×10⁷, 2×10⁷, 3×10⁷, 4×10⁷, 5×10⁷, 6×10⁷, 7×10⁷, 8×10⁷, 9×10⁷, 1×10⁸, 2×10⁸, 3×10⁸, 4×10⁸, 5×10⁸, 6×10⁸, 7×10⁸, 8×10⁸, 9×10⁸, 1×10⁹, 2×10⁹, 3×10⁹, 4×10⁹, 5×10⁹, 6×10⁹, 7×10⁹, 8×10⁹, 9×10⁹, 1×10¹⁰, 2×10¹⁰, 3×10¹⁰, 4×10¹⁰, 5×10¹⁰, 5.7×10¹⁰, 6×10¹⁰, 7×10¹⁰, 8×10¹⁰, 9×10¹⁰, 1×10¹¹, 2×10¹¹, 3×10¹¹, 4×10¹¹, 5×10¹¹, 6×10¹¹, 7×10¹¹, 8×10¹¹, 9×10¹¹, 1×10¹², 1.9×10¹², 2×10¹², 3×10¹², 4×10¹², 5×10¹², 6×10¹², 7×10¹², 8×10¹², 9×10¹², 1×10¹³, 2×10¹³, 3×10¹³, 4×10¹³, 5×10¹³, 6×10¹³, 7×10¹³, 8×10¹³, 9×10¹³, 1×10¹⁴, 2×10¹⁴, 3×10¹⁴, 4×10¹⁴, 5×10¹⁴ 6×10¹⁴, 7×10¹⁴, 8×10¹⁴, 9×10¹⁴, 1×10¹⁵, 2×10¹⁵, 3×10¹⁵, 4×10¹⁵, 5×10¹⁵, 6×10¹⁵, 7×10¹⁵, 8×10¹⁵, 9×10¹⁵, or 1×10¹⁶ VG/site. In one embodiment, the dose per site is 5.7×10¹⁰ VG/site.

[0276] In one embodiment, the maximum flowrate of a formulation comprising the AAV particles described herein is 0.1 uL/min, 0.2 uL/min, 0.3 uL/min, 0.4 uL/min, 0.5 uL/min, 0.6 uL/min, 0.7 uL/min, 0.8 uL/min, 0.9 uL/min, 1 uL/min, 2 uL/min, 3 uL/min, 4 uL/min, 5 uL/min, 6 uL/min, 7 uL/min, 8 uL/min, 9 uL/min, 10 uL/min, 11 uL/min, 12 uL/min, 13 uL/min, 14 uL/min, 15 uL/min, 16 uL/min, 17 uL/min, 18 uL/min, 19 uL/min, 20 uL/min, 21 uL/min, 22 uL/min, 23 uL/min, 24 uL/min, 25 uL/min, 26 uL/min, 27 uL/min, 28 uL/min, 29 uL/min, 30 uL/min, 31 uL/min, 32 uL/min, 33 uL/min, 34 uL/min, 35 uL/min, 36 uL/min, 37 uL/min, 38 uL/min, 39 uL/min, 40 uL/min, 41 uL/min, 42 uL/min, 43 uL/min, 44 uL/min, 45 uL/min, 46 uL/min, 47 uL/min, 48 uL/min, 49 uL/min, 50 uL/min, or more than 50 uL/min. The maximum flowrate may depend on various factors including, but not limited to, the tissue for delivery, the progression of the disease, formulation, and temperature of formulation. As a non-limiting example, the maximum flowrate for white matter tissue may be 40 uL/min. As another non-limiting example, the maximum flowrate for thalamus tissue is 20 uL/min. As yet another non-limiting example, the maximum flowrate for putamen tissue is 15 uL/min.

[0277] In one embodiment, delivery of AAV particles to cells of the central nervous system is performed by intraparenchymal (IPa) administration in a subject who has been diagnosed with or used for treatment of a subject who may have Parkinson's Disease (PD), Huntington's Disease (HD), and/or Alzheimer's Disease (AD).

[0278] In one embodiment, delivery of AAV particles to brain tissue is performed by intraparenchymal (IPa) administration in a subject who has been diagnosed with or used for treatment of a subject who may have Parkinson's Disease (PD), Huntington's Disease (HD), and/or Alzheimer's Disease (AD).

[0279] In one embodiment, a catheter used for IPa administration of the AAV particles is compatible with stereotactic fixtures, is MRI-safe (up to 3T), has a CED flow rate of greater than 15 ul/min, reflux-resistant and/or is repositionable. The catheter may also include a pressure sensor and may have individual flow channels to provide multiple infusion levels.

[0280] In one embodiment, a catheter used for IPa administration of the AAV particles may include, but is not limited to, the SmartFlow catheter (MRI Interventions), SmartFlow Adjustable Tip Catheter (MRI Interventions), Cleveland Multiport Catheter (Infuseon Therapeutics, Inc.), MEMS catheter (Alcyone Lifesciences, Inc.), Carbothane CED cannula (Renishaw) Smartflow Flex (BrainLab) and/or Intracerebral Microinj ection Instrument (IMI) (Atanse).

[0281] In one embodiment, the device used to deliver the AAV particles of the invention by IPa administration may be, but is not limited to, a device from MRI Intervention, Alcyone, Atanse and/or Medgenesis.

[0282] In one embodiment, the AAV particles are delivered by intraparenchymal administration to a subject using at least one site. As a non-limiting example, the dose of AAV particles may be 3.4×10¹¹ vg administered bilaterally to the caudate and putamen at a dose a volume of 30 ul/site. As a non-limiting example, the dose of AAV particles may be 3.4×10¹¹ vg administered bilaterally to the left caudate and right putamen at a dose a volume of 30 ul/site. As a non-limiting example, the dose of AAV particles may be 3.4×10¹¹ vg administered bilaterally to the right caudate and left putamen at a dose a volume of 30 ul/site. As a non-limiting example, the dose of AAV particles may be 3.4×10¹¹ vg administered bilaterally to the left caudate and left putamen at a dose a volume of 30 ul/site. As a non-limiting example, the dose of AAV particles may be 3.4×10¹¹ vg administered bilaterally to the right caudate and right putamen at a dose a volume of 30 ul/site. As a non-limiting example, the dose of AAV particles may be 1.1×10¹¹ vg administered bilaterally to the caudate and putamen at a dose a volume of 30 ul/site. As a non-limiting example, the dose of AAV particles may be 1.1×10¹¹ vg administered bilaterally to the left caudate and right putamen at a dose a volume of 30 ul/site. As a non-limiting example, the dose of AAV particles may be 1.1×10¹¹ vg administered bilaterally to the right caudate and left putamen at a dose a volume of 30 ul/site. As a non-limiting example, the dose of AAV particles may be 1.1×10¹¹ vg administered bilaterally to the left caudate and left putamen at a dose a volume of 30 ul/site. As a non-limiting example, the dose of AAV particles may be 1.1×10¹¹ vg administered bilaterally to the right caudate and right putamen at a dose a volume of 30 ul/site. As a non-limiting example, the dose of AAV particles may be 5.7×10¹⁰ vg administered to either the left or right caudate at a dose a volume of 30 ul/site. As a non-limiting example, the dose of AAV particles may be 5.7×10¹⁰ vg administered to both the left and right caudate at a dose a volume of 30 ul/site. As a non-limiting example, the dose of AAV particles may be 5.7×10¹⁰ vg administered to either the left or right putamen at a dose a volume of 30 ul/site. As a non-limiting example, the dose of AAV particles may be 5.7×10¹⁰ vg administered to both the left and right putamen at a dose a volume of 30 ul/site.

[0283] In one embodiment, the AAV particles comprise an AAV1 capsid are delivered by intraparenchymal administration to a subject using at least one site. As a non-limiting example, the dose of AAV particles may be 3.4×10¹¹ vg administered bilaterally to the caudate and putamen at a dose a volume of 30 ul/site. As a non-limiting example, the dose of AAV particles may be 3.4×10¹¹ vg administered bilaterally to the left caudate and right putamen at a dose a volume of 30 ul/site. As a non-limiting example, the dose of AAV particles may be 3.4×10¹¹ vg administered bilaterally to the right caudate and left putamen at a dose a volume of 30 ul/site. As a non-limiting example, the dose of AAV particles may be 3.4×10¹¹ vg administered bilaterally to the left caudate and left putamen at a dose a volume of 30 ul/site. As a non-limiting example, the dose of AAV particles may be 3.4×10¹¹ vg administered bilaterally to the right caudate and right putamen at a dose a volume of 30 ul/site. As a non-limiting example, the dose of AAV particles may be 1.1×10¹¹ vg administered bilaterally to the caudate and putamen at a dose a volume of 30 ul/site. As a non-limiting example, the dose of AAV particles may be 1.1×10¹¹ vg administered bilaterally to the left caudate and right putamen at a dose a volume of 30 ul/site. As a non-limiting example, the dose of AAV particles may be 1.1×10¹¹ vg administered bilaterally to the right caudate and left putamen at a dose a volume of 30 ul/site. As a non-limiting example, the dose of AAV particles may be 1.1×10¹¹ vg administered bilaterally to the left caudate and left putamen at a dose a volume of 30 ul/site. As a non-limiting example, the dose of AAV particles may be 1.1×10¹¹ vg administered bilaterally to the right caudate and right putamen at a dose a volume of 30 ul/site. As a non-limiting example, the dose of AAV particles may be 5.7×10¹⁰ vg administered to either the left or right caudate at a dose a volume of 30 ul/site. As a non-limiting example, the dose of AAV particles may be 5.7×10¹⁰ vg administered to both the left and right caudate at a dose a volume of 30 ul/site. As a non-limiting example, the dose of AAV particles may be 5.7×10¹⁰ vg administered to either the left or right putamen at a dose a volume of 30 ul/site. As a non-limiting example, the dose of AAV particles may be 5.7×10¹⁰ vg administered to both the left and right putamen at a dose a volume of 30 ul/site.

### Intracerebroventricular (ICV) Administration

[0284] In one embodiment, delivery of AAV particles to cells of the central nervous system (e.g., parenchyma) is performed by intracerebroventricular (ICV) administration. ICV administration comprises delivery by injection into the ventricular system of the brain usually by prolonged infusion. ICV prolonged infusion may comprise delivery to any of the ventricles of the brain, including, but not limited to, either of the two lateral ventricles left and right, third ventricle, and/or fourth ventricle. ICV prolonged infusion may comprise delivery to any of the foramina, or channels that connect the ventricles, including, but not limited to, interventricular foramina, also called the foramina of Monroe, cerebral aqueduct, cistema magna, and/or central canal. ICV prolonged infusion may comprise delivery to any of the apertures of the ventricular system including, but not limited to, the median aperture (aka foramen of Magendie), right lateral aperture, and/or left lateral aperture (aka foramina of Lushka). In one embodiment, ICV prolonged infusion comprises delivery to the perivascular space in the brain.

[0285] In one embodiment, a catheter used for ICV administration of the AAV particles may include, but is not limited to, the SmartFlow catheter (MRI Interventions), SmartFlow Adjustable Tip Catheter (MRI Interventions), Cleveland Multiport Catheter (Infuseon Therapeutics, Inc.), MEMS catheter (Alcyone Lifesciences, Inc.), Carbothane CED cannula (Renishaw) Smartflow Flex (BrainLab) and/or Intracerebral Microinj ection Instrument (IMI) (Atanse).

[0286] In one embodiment, subjects such as mammals (e.g., non-human primates (NHPs)) are administered by intracerebroventricular (ICV) infusion the AAV particles described herein. The AAV particles may comprise scAAV or ssAAV, of any of the serotypes described herein, comprising a payload (e.g., a transgene). The dose may be 1×10¹³ to 3×10¹³ vg per subject. The subject may be administered a dose of the AAV particles over an extended period of time such as, but not limited to, 10 ml over 10 hours. The subjects may be evaluated 14-30 days (e.g., 14, 21, 28, or 30 days) after administration to determine the expression of the payload in the subject. Further, the subject may be evaluated prior to administration and after administration to determine changes in behavior and activity such as, but not limited to, tremors, lethargic behavior, motor deficits in limbs, strength, spinal reflex deficits, food consumption. (For AAV9 in Non Human Primates (Cyno) see: Samaranch et al. Human Gene Therapy 23:382-389 April 2012, Samaranch et al. Human Gene Therapy 24: 526-532 May 2013, Samaranch et al. Molecular Therapy 22(2) 329-337 February 2014, Gray et al. Gene Ther. 20(4) 450-459 April 2013; the contents of each of which are herein incorporated by reference in their entireties).

[0287] In one embodiment, the AAV particles are delivered by intracerebroventricular infusion. As a non-limiting example, the dose of AAV particles may be 1.0×10¹³ vg administered for 10 hours.

[0288] In one embodiment, the AAV particles are ssAAV particles and they are delivered by intracerebroventricular infusion. As a non-limiting example, the dose of ssAAV particles may be 1.0×10¹³ vg administered for 10 hours.

[0289] In one embodiment, the AAV particles are scAAV particles and they are delivered by intracerebroventricular infusion. As a non-limiting example, the dose of scAAV particles may be 1.0×10¹³ vg administered for 10 hours.

[0290] In one embodiment, the AAV particles comprise an AAV1 capsid and are delivered by intracerebroventricular infusion. As a non-limiting example, the dose of AAV particles may be 1.0×10¹³ vg administered for 10 hours.

[0291] In one embodiment, the AAV particles comprise an AAV1 capsid and are ssAAV particles and they are delivered by intracerebroventricular infusion. As a non-limiting example, the dose of ssAAV particles may be 1.0×10¹³ vg administered for 10 hours.

[0292] In one embodiment, the AAV particles comprise an AAV1 capsid and are scAAV particles and they are delivered by intracerebroventricular infusion. As a non-limiting example, the dose of scAAV particles may be 1.0×10¹³ vg administered for 10 hours.

[0293] In one embodiment, the AAV particles comprise an AAV-DJ8 capsid and are delivered by intracerebroventricular infusion. As a non-limiting example, the dose of AAV particles may be 1.0×10¹³ vg administered for 10 hours.

[0294] In one embodiment, the AAV particles comprise an AAV-DJ8 capsid and are ssAAV particles and they are delivered by intracerebroventricular infusion. As a non-limiting example, the dose of ssAAV particles may be 1.0×10¹³ vg administered for 10 hours.

[0295] In one embodiment, the AAV particles comprise an AAV-DJ8 capsid and are scAAV particles and they are delivered by intracerebroventricular infusion. As a non-limiting example, the dose of scAAV particles may be 1.0×10¹³ vg administered for 10 hours.

### Intrathecal (IT) Administration

[0296] In one embodiment, the AAV particles described herein may be administered to a subject by intrathecal (IT) administration such as by infusion.

[0297] In one embodiment, intrathecal administration delivers AAV particles to targeted regions of the CNS. Non-limiting examples of regions of the CNS to deliver AAV particles include dorsal root ganglion, dentate nucleus-cerebellum and the auditory pathway.

[0298] In one embodiment, intrathecal administration of AAV particles provides peripheral exposure which is as low as possible or a moderate level that is beneficial. As a non-limiting example, intrathecal administration of AAV particles shows almost no peripheral exposure to the liver.

[0299] For intrathecal infusion, while not wishing to be bound by theory, AAV macrodistribution across the spinal cord and brain can be governed by CSF flow and dosing parameters such as infusion rate. AAV microdistribution into tissue can be controlled by a variety of properties including CSF flow, AAV tissue exposure to enhance interstitial movement (time and concentration) and the biological properties of the AAV. AAV fine distribution into cells may be a function of the biology of the AAV such as, but not limited to, receptor binding, retrograde transport and anterograde transport.

[0300] In some embodiments IT infusion comprises delivery to the cervical, thoracic, and or lumbar regions of the spine.

[0301] In one embodiment, the catheter used to deliver the AAV particles via intrathecal administration is located in the lumbar region of the spinal cord. The catheter may be located in one or more than one location in the lumbar region.

[0302] In one embodiment, the catheter used to deliver the AAV particles via intrathecal administration is located in the cervical region of the spinal cord. The catheter may be located in one or more than one location in the cervical region.

[0303] In one embodiment, the catheter used to deliver the AAV particles via intrathecal administration is located in the lumbar region and the cervical region of the spinal cord. As a non-limiting example, a catheter may be located in the cervical and the lumbar region. As another non-limiting example, a catheter may be located in the cervical region and two catheters may be located in the lumbar region.

[0304] As used herein, IT infusion into the spine is defined by the vertebral level at the site of prolonged infusion. In some embodiments IT infusion comprises delivery to the cervical region of the spine at any location including, but not limited to C1, C2, C3, C4, C5, C6, C7, and/or C8. In some embodiments IT infusion comprises delivery to the thoracic region of the spine at any location including, but not limited to T1, T2, T3, T3, T4, T5, T6, T7, T8, T9, T10, T11, and/or T12. In some embodiments IT infusion comprises delivery to the lumbar region of the spine at any location including, but not limited to L1, L2, L3, L3, L4, L5, and/or L6. In some embodiments IT infusion comprises delivery to the sacral region of the spine at any location including, but not limited to S1, S2, S3, S4, or S5. In some embodiments, delivery by IT infusion comprises one or more than one site of prolonged infusion.

[0305] In some embodiments, delivery by IT infusion may comprise 1, 2, 3, 4, 5, 6, 7, 8, 9, 10, 11, 12, 13, 14, 15, 16, 17, 18, 19, 20, 21, 22, 23, 24, or 25 sites infusion. In one embodiment, delivery by IT infusion comprises at least three sites of infusion. In one embodiment, delivery by IT infusion consists of three sites of infusion. In one embodiment, delivery by IT infusion comprises three sites of infusion at C1, T1, and L1.

[0306] In one embodiment, delivery by IT infusion includes administration using a cervical catheter located at C5.

[0307] In one embodiment, delivery by IT infusion includes administration using a cervical catheter located at C1.

[0308] In one embodiment, delivery by IT infusion may be via a cervical catheter placed between C1 and C2.

[0309] In one embodiment, delivery by IT infusion may be via a thoracolumbar catheter placed between T10 and L1.

[0310] In one embodiment, the catheter for IT infusion may be placed in the cervical region such as, but not limited to, C1-C2.

[0311] In one embodiment, the catheter for IT infusion may be placed thoracolumbar such as, but not limited to, T10/L1.

[0312] In one embodiment, IT administration may be used to deliver AAV particles to motor neurons. As a non-limiting example, the motor neurons are located in the ventral horn of the spinal cord.

[0313] In one embodiment, IT administration may be used to deliver AAV particles to motor neurons to treat ALS and/or the symptoms or ALS. As a non-limiting example, the motor neurons are located in the ventral horn of the spinal cord.

[0314] In one embodiment, IT administration may be used to deliver AAV particles to motor neurons to treat SMA and/or the symptoms or SMA. As a non-limiting example, the motor neurons are located in the ventral horn of the spinal cord.

[0315] In one embodiment, IT administration may be used to deliver AAV particles to sensory neurons and/or dorsal root ganglion.

[0316] In one embodiment, IT administration may be used to deliver AAV particles to sensory neurons and/or dorsal root ganglion to treat FA and/or the symptoms of FA.

[0317] In one embodiment, IT administration may be used to deliver AAV particles to sensory neurons and/or dorsal root ganglion to treat Neuropathic Pain and/or the symptoms of Neuropathic Pain.

[0318] In one embodiment, subjects such as mammals (e.g., non-human primates (NHPs)) are administered by intrathecal (IT) infusion the AAV particles described herein. The AAV particles may comprise scAAV or ssAAV, of any of the serotypes described herein, comprising a payload (e.g., atransgene). The dose may be 1×10¹³ to 3×10¹³ vg per subject. The subject may be administered a dose of the AAV particles over an extended period of time such as, but not limited to, 10 ml over 10 hours. The subjects may be evaluated 14-30 days (e.g., 14, 21, 28, or 30 days) after administration to determine the expression of the payload in the subject. Further, the subject may be evaluated prior to administration and after administration to determine changes in behavior and activity such as, but not limited to, tremors, lethargic behavior, motor deficits in limbs, strength, spinal reflex deficits, food consumption. (For AAV9 in Non Human Primates (Cyno) see: Samaranch et al. Human Gene Therapy 23:382-389 April 2012, Samaranch et al. Human Gene Therapy 24: 526-532 May 2013, Samaranch et al. Molecular Therapy 22(2) 329-337 February 2014, Gray et al. Gene Ther. 20(4) 450-459 April 2013; the contents of each of which are herein incorporated by reference in their entireties).

[0319] In one embodiment, administration of the AAV particles may be by IT administration and the AAV particles comprise an AAVrh10 capsid. As a non-limiting example, the AAV particle is single stranded (ss). As another non-limiting example, the AAV particle is self-complementary (sc).

[0320] In one embodiment, administration of the AAV particles may be by IT administration and the AAV particles comprise an AAV6 capsid. As a non-limiting example, the AAV particle is single stranded (ss). As another non-limiting example, the AAV particle is self-complementary (sc).

[0321] In one embodiment, administration of the AAV particles may be by IT administration and the AAV particles comprise an AAV5 capsid. As a non-limiting example, the AAV particle is single stranded (ss). As another non-limiting example, the AAV particle is self-complementary (sc).

[0322] In one embodiment, administration of the AAV particles targets the motor neurons via IT administration of the AAV particles described herein. As a non-limiting example, the AAV particle comprises an AAVrh10 capsid and is single stranded (ss). As a non-limiting example, the AAV particle comprises an AAVrh10 capsid and is self-complementary (sc). As a non-limiting example, the AAV particle comprises an AAV6 capsid and is single stranded (ss). As a non-limiting example, the AAV particle comprises an AAV6 capsid and is self-complementary (sc).

[0323] In one embodiment, administration of the AAV particles targets the proprioceptive sensory neurons via IT administration of the AAV particles described herein. As a non-limiting example, the AAV particle comprises an AAVrh10 capsid and is single stranded (ss). As a non-limiting example, the AAV particle comprises an AAVrh10 capsid and is self-complementary (sc). As a non-limiting example, the AAV particle comprises an AAV6 capsid and is single stranded (ss). As a non-limiting example, the AAV particle comprises an AAV6 capsid and is self-complementary (sc).

[0324] In one embodiment, administration of the AAV particles targets the motor neurons via IT administration of the AAV particles described herein to treat and/or mitigate the symptoms of amyotrophic lateral sclerosis (ALS). As a non-limiting example, the AAV particle comprises an AAVrh10 capsid and is single stranded (ss). As a non-limiting example, the AAV particle comprises an AAVrh10 capsid and is self-complementary (sc). As a non-limiting example, the AAV particle comprises an AAV6 capsid and is single stranded (ss). As a non-limiting example, the AAV particle comprises an AAV6 capsid and is self-complementary (sc).

[0325] In one embodiment, administration of the AAV particles targets the proprioceptive sensory neurons via IT administration of the AAV particles described herein to treat and/or mitigate the symptoms of Friedreich's Ataxia (FA). As a non-limiting example, the AAV particle comprises an AAVrh10 capsid and is single stranded (ss). As a non-limiting example, the AAV particle comprises an AAVrh10 capsid and is self-complementary (sc). As a non-limiting example, the AAV particle comprises an AAV6 capsid and is single stranded (ss). As a non-limiting example, the AAV particle comprises an AAV6 capsid and is self-complementary (sc).

[0326] In one embodiment, a catheter used for IT administration of the AAV particles may include, but is not limited to, the SmartFlow catheter (MRI Interventions), SmartFlow Adjustable Tip Catheter (MRI Interventions), Cleveland Multiport Catheter (Infuseon Therapeutics, Inc.), MEMS catheter (Alcyone Lifesciences, Inc.), Carbothane CED cannula (Renishaw) Smartflow Flex (BrainLab) and/or Intracerebral Microinj ection Instrument (IMI) (Atanse).

[0327] In one embodiment, the device used to deliver the AAV particles of the invention by IT infusion may be, but is not limited to, a device from Medtronic Neuromodulation, Codman Neuro and/or Alcyone.

[0328] In one embodiment, an intrathecal delivery method from Alcyone may be used to administer the AAV particles described herein. As a non-limiting example, the method leverages the natural pulsatility of CSF to ensure effective delivery of. Additionally, a sensor and camera enabled steerable catheter may be used in the intrathecal delivery of the AAV particles described herein.

[0329] In one embodiment, the AAV particles are delivered by intrathecal administration to a subject using at least one site. As a non-limiting example, the dose of AAV particles may be 3×10¹³ vg administered at 3 sites at a volume/rate of 3 ml/3 hours. As another non-limiting example, the dose of AAV particles may be 1×10¹³ vg or 3×10¹³ vg administered at one site in the L (e.g., L1) or C region at a volume/rate of 10 ml/10 hours. As another non-limiting example, the dose of AAV particles may be 3×10¹³ vg administered at 3 sites as a bolus infusion of 1 ml or 3 ml. As another non-limiting example, the dose of AAV particles may be 1×10¹³ vg administered at 1 site (e.g., L or C region) as a bolus infusion of 1 ml. As another non-limiting example, the dose of AAV particles may be 3×10¹³ vg administered at 1 site (e.g., L or C region) as a bolus infusion of 3 ml. As another non-limiting example, the dose of AAV particles may be 2×10¹³ vg, 2×10¹² vg, 2×10¹¹ vg, or 2×10¹⁰ vg administered at 1 site (e.g., L or C region) as 2 bolus infusions.

[0330] In one embodiment, the AAV particles are scAAV particles and are delivered by intrathecal administration to a subject using at least one site. As a non-limiting example, the dose of scAAV particles may be 3×10¹³ vg administered at 3 sites at a volume/rate of 3 ml/3 hours. As another non-limiting example, the dose of scAAV particles may be 1×10¹³ vg or 3×10¹³ vg administered at one site in the L (e.g., L1) or C region at a volume/rate of 10 ml/10 hours. As another non-limiting example, the dose of scAAV particles may be 3×10¹³ vg administered at 3 sites as a bolus infusion. As another non-limiting example, the dose of scAAV particles may be 1×10¹³ vg administered at 1 site as a bolus infusion of 1 ml. As another non-limiting example, the dose of scAAV particles may be 3×10¹³ vg administered at 1 site (e.g., L or C region) as a bolus infusion of 3 ml. As another non-limiting example, the dose of scAAV particles may be 2×10¹³ vg, 2×10¹² vg, 2×10¹¹ vg, or 2×10¹⁰ vg administered at 1 site (e.g., L or C region) as 2 bolus infusions.

[0331] In one embodiment, the AAV particles are ssAAV particles and are delivered by intrathecal administration to a subject using at least one site. As a non-limiting example, the dose of ssAAV particles may be 3×10¹³ vg administered at 3 sites at a volume/rate of 3 ml/3 hours. As another non-limiting example, the dose of ssAAV particles may be 1×10¹³ vg or 3×10¹³ vg administered at one site in the L (e.g., L1) or C region at a volume/rate of 10 ml/10 hours. As another non-limiting example, the dose of ssAAV particles may be 3×10¹³ vg administered at 3 sites as a bolus infusion. As another non-limiting example, the dose of ssAAV particles may be 1×10¹³ vg administered at 1 site as a bolus infusion of 1 ml. As another non-limiting example, the dose of ssAAV particles may be 3×10¹³ vg administered at 1 site (e.g., L or C region) as a bolus infusion of 3 ml. As another non-limiting example, the dose of ssAAV particles may be 2×10¹³ vg, 2×10¹² vg, 2×10¹⁰ vg, or 2×10¹⁰ vg administered at 1 site (e.g., L or C region) as 2 bolus infusions.

[0332] In one embodiment, the AAV particles comprise an rh10 capsid and are delivered to a subject by intrathecal administration using at least one site. As a non-limiting example, the dose of AAV particles may be 3×10¹³ vg administered at 3 sites at a volume/rate of 3 ml/3 hours. As another non-limiting example, the dose of AAV particles may be 1×10¹³ vg or 3×10¹³ vg administered at one site in the L (e.g., L1) or C region at a volume/rate of 10 ml/10 hours. As another non-limiting example, the dose of AAV particles may be 3×10¹³ vg administered at 3 sites as a bolus infusion. As another non-limiting example, the dose of AAV particles may be 1×10¹³ vg administered at 1 site as a bolus infusion of 1 ml. As another non-limiting example, the dose of AAV particles may be 3×10¹³ vg administered at 1 site (e.g., L or C region) as a bolus infusion of 3 ml. As another non-limiting example, the dose of AAV particles may be 2×10¹³ vg, 2×10¹² vg, 2×10¹¹ vg, or 2×10¹⁰ vg administered at 1 site (e.g., L or C region) as 2 bolus infusions.

[0333] In one embodiment, the AAV particles are ssAAV particles and comprise an rh10 capsid and are delivered to a subject by intrathecal administration using at least one site. As a non-limiting example, the dose of ssAAV particles may be 3×10¹³ vg administered at 3 sites at a volume/rate of 3 ml/3 hours. As another non-limiting example, the dose of ssAAV particles may be 1×10¹³ vg or 3×10¹³ vg administered at one site in the L (e.g., L1) or C region at a volume/rate of 10 ml/10 hours. As another non-limiting example, the dose of ssAAV particles may be 3×10¹³ vg administered at 3 sites as a bolus infusion. As another non-limiting example, the dose of ssAAV particles may be 1×10¹³ vg administered at 1 site as a bolus infusion of 1 ml. As another non-limiting example, the dose of ssAAV particles may be 3×10¹³ vg administered at 1 site (e.g., L or C region) as a bolus infusion of 3 ml. As another non-limiting example, the dose of ssAAV particles may be 2×10¹³ vg, 2×10¹² vg, 2×10¹¹ vg, or 2×10¹⁰ vg administered at 1 site (e.g., L or C region) as 2 bolus infusions.

[0334] In one embodiment, the AAV particles are scAAV particles and comprise an rh10 capsid and are delivered to a subject by intrathecal administration using at least one site. As a non-limiting example, the dose of scAAV particles may be 3×10¹³ vg administered at 3 sites at a volume/rate of 3 ml/3 hours. As another non-limiting example, the dose of scAAV particles may be 1×10¹³ vg or 3×10¹³ vg administered at one site in the L (e.g., L1) or C region at a volume/rate of 10 ml/10 hours. As another non-limiting example, the dose of scAAV particles may be 3×10¹³ vg administered at 3 sites as a bolus infusion. As another non-limiting example, the dose of scAAV particles may be 1×10¹³ vg administered at 1 site as a bolus infusion of 1 ml. As another non-limiting example, the dose of scAAV particles may be 3×10¹³ vg administered at 1 site (e.g., L or C region) as a bolus infusion of 3 ml. As another non-limiting example, the dose of scAAV particles may be 2×10¹³ vg, 2×10¹² vg, 2×10¹¹ vg, or 2×10¹⁰ vg administered at 1 site (e.g., L or C region) as 2 bolus infusions.

[0335] In one embodiment, the AAV particles comprise an AAV1 capsid and are delivered to a subject by intrathecal administration using at least one site. As a non-limiting example, the dose of AAV particles may be 3×10¹³ vg administered at 3 sites at a volume/rate of 3 ml/3 hours. As another non-limiting example, the dose of AAV particles may be 1×10¹³ vg or 3×10¹³ vg administered at one site in the L (e.g., L1) or C region at a volume/rate of 10 ml/10 hours. As another non-limiting example, the dose of AAV particles may be 3×10¹³ vg administered at 3 sites as a bolus infusion. As another non-limiting example, the dose of AAV particles may be 1×10¹³ vg administered at 1 site as a bolus infusion of 1 ml. As another non-limiting example, the dose of AAV particles may be 3×10¹³ vg administered at 1 site (e.g., L or C region) as a bolus infusion of 3 ml. As another non-limiting example, the dose of AAV particles may be 2×10¹³ vg, 2×10¹² vg, 2×10¹¹ vg, or 2×10¹⁰ vg administered at 1 site (e.g., L or C region) as 2 bolus infusions.

[0336] In one embodiment, the AAV particles are ssAAV particles and comprise an AAV1 capsid and are delivered to a subject by intrathecal administration using at least one site. As a non-limiting example, the dose of ssAAV particles may be 3×10¹³ vg administered at 3 sites at a volume/rate of 3 ml/3 hours. As another non-limiting example, the dose of ssAAV particles may be 1×10¹³ vg or 3×10¹³ vg administered at one site in the L (e.g., L1) or C region at a volume/rate of 10 ml/10 hours. As another non-limiting example, the dose of ssAAV particles may be 3×10¹³ vg administered at 3 sites as a bolus infusion. As another non-limiting example, the dose of ssAAV particles may be 1×10¹³ vg administered at 1 site as a bolus infusion of 1 ml. As another non-limiting example, the dose of ssAAV particles may be 3×10¹³ vg administered at 1 site (e.g., L or C region) as a bolus infusion of 3 ml. As another non-limiting example, the dose of ssAAV particles may be 2×10¹³ vg, 2×10¹² vg, 2×10¹¹ vg, or 2×10¹⁰ vg administered at 1 site (e.g., L or C region) as 2 bolus infusions.

[0337] In one embodiment, the AAV particles are scAAV particles and comprise an AAV1 capsid and are delivered to a subject by intrathecal administration using at least one site. As a non-limiting example, the dose of scAAV particles may be 3×10¹³ vg administered at 3 sites at a volume/rate of 3 ml/3 hours. As another non-limiting example, the dose of scAAV particles may be 1×10¹³ vg or 3×10¹³ vg administered at one site in the L (e.g., L1) or C region at a volume/rate of 10 ml/10 hours. As another non-limiting example, the dose of scAAV particles may be 3×10¹³ vg administered at 3 sites as a bolus infusion. As another non-limiting example, the dose of scAAV particles may be 1×10¹³ vg administered at 1 site as a bolus infusion of 1 ml. As another non-limiting example, the dose of scAAV particles may be 3×10¹³ vg administered at 1 site (e.g., L or C region) as a bolus infusion of 3 ml. As another non-limiting example, the dose of scAAV particles may be 2×10¹³ vg, 2×10¹² vg, 2×10¹¹ vg, or 2×10¹⁰ vg administered at 1 site (e.g., L or C region) as 2 bolus infusions.

[0338] In one embodiment, the AAV particles comprise an AAV2 capsid and are delivered to a subject by intrathecal administration using at least one site. As a non-limiting example, the dose of AAV particles may be 3×10¹³ vg administered at 3 sites at a volume/rate of 3 ml/3 hours. As another non-limiting example, the dose of AAV particles may be 1×10¹³ vg or 3×10¹³ vg administered at one site in the L (e.g., L1) or C region at a volume/rate of 10 ml/10 hours. As another non-limiting example, the dose of AAV particles may be 3×10¹³ vg administered at 3 sites as a bolus infusion. As another non-limiting example, the dose of AAV particles may be 1×10¹³ vg administered at 1 site as a bolus infusion of 1 ml. As another non-limiting example, the dose of AAV particles may be 3×10¹³ vg administered at 1 site (e.g., L or C region) as a bolus infusion of 3 ml. As another non-limiting example, the dose of AAV particles may be 2×10¹³ vg, 2×10¹² vg, 2×10¹¹ vg, or 2×10¹⁰ vg administered at 1 site (e.g., L or C region) as 2 bolus infusions.

[0339] In one embodiment, the AAV particles are ssAAV particles and comprise an AAV2 capsid and are delivered to a subject by intrathecal administration using at least one site. As a non-limiting example, the dose of ssAAV particles may be 3×10¹³ vg administered at 3 sites at a volume/rate of 3 ml/3 hours. As another non-limiting example, the dose of ssAAV particles may be 1×10¹³ vg or 3×10¹³ vg administered at one site in the L (e.g., L1) or C region at a volume/rate of 10 ml/10 hours. As another non-limiting example, the dose of ssAAV particles may be 3×10¹³ vg administered at 3 sites as a bolus infusion. As another non-limiting example, the dose of ssAAV particles may be 1×10¹³ vg administered at 1 site as a bolus infusion of 1 ml. As another non-limiting example, the dose of ssAAV particles may be 3×10¹³ vg administered at 1 site (e.g., L or C region) as a bolus infusion of 3 ml. As another non-limiting example, the dose of ssAAV particles may be 2×10¹³ vg, 2×10¹² vg, 2×10¹¹ vg, or 2×10¹⁰ vg administered at 1 site (e.g., L or C region) as 2 bolus infusions.

[0340] In one embodiment, the AAV particles are scAAV particles and comprise an AAV2 capsid and are delivered to a subject by intrathecal administration using at least one site. As a non-limiting example, the dose of scAAV particles may be 3×10¹³ vg administered at 3 sites at a volume/rate of 3 ml/3 hours. As another non-limiting example, the dose of scAAV particles may be 1×10¹³ vg or 3×10¹³ vg administered at one site in the L (e.g., L1) or C region at a volume/rate of 10 ml/10 hours. As another non-limiting example, the dose of scAAV particles may be 3×10¹³ vg administered at 3 sites as a bolus infusion. As another non-limiting example, the dose of scAAV particles may be 1×10¹³ vg administered at 1 site as a bolus infusion of 1 ml. As another non-limiting example, the dose of scAAV particles may be 3×10¹³ vg administered at 1 site (e.g., L or C region) as a bolus infusion of 3 ml. As another non-limiting example, the dose of scAAV particles may be 2×10¹³ vg, 2×10¹² vg, 2×10¹¹ vg, or 2×10¹⁰ vg administered at 1 site (e.g., L or C region) as 2 bolus infusions.

[0341] In one embodiment, the AAV particles comprise an AAV5 capsid and are delivered to a subject by intrathecal administration using at least one site. As a non-limiting example, the dose of AAV particles may be 3×10¹³ vg administered at 3 sites at a volume/rate of 3 ml/3 hours. As another non-limiting example, the dose of AAV particles may be 1×10¹³ vg or 3×10¹³ vg administered at one site in the L (e.g., L1) or C region at a volume/rate of 10 ml/10 hours. As another non-limiting example, the dose of AAV particles may be 3×10¹³ vg administered at 3 sites as a bolus infusion. As another non-limiting example, the dose of AAV particles may be 1×10¹³ vg administered at 1 site as a bolus infusion of 1 ml. As another non-limiting example, the dose of AAV particles may be 3×10¹³ vg administered at 1 site (e.g., L or C region) as a bolus infusion of 3 ml. As another non-limiting example, the dose of AAV particles may be 2×10¹³ vg, 2×10¹² vg, 2×10¹¹ vg, or 2×10¹⁰ vg administered at 1 site (e.g., L or C region) as 2 bolus infusions.

[0342] In one embodiment, the AAV particles are ssAAV particles and comprise an AAV5 capsid and are delivered to a subject by intrathecal administration using at least one site. As a non-limiting example, the dose of ssAAV particles may be 3×10¹³ vg administered at 3 sites at a volume/rate of 3 ml/3 hours. As another non-limiting example, the dose of ssAAV particles may be 1×10¹³ vg or 3×10¹³ vg administered at one site in the L (e.g., L1) or C region at a volume/rate of 10 ml/10 hours. As another non-limiting example, the dose of ssAAV particles may be 3×10¹³ vg administered at 3 sites as a bolus infusion. As another non-limiting example, the dose of ssAAV particles may be 1×10¹³ vg administered at 1 site as a bolus infusion of 1 ml. As another non-limiting example, the dose of ssAAV particles may be 3×10¹³ vg administered at 1 site (e.g., L or C region) as a bolus infusion of 3 ml. As another non-limiting example, the dose of ssAAV particles may be 2×10¹³ vg, 2×10¹² vg, 2×10¹¹ vg, or 2×10¹⁰ vg administered at 1 site (e.g., L or C region) as 2 bolus infusions.

[0343] In one embodiment, the AAV particles are scAAV particles and comprise an AAV5 capsid and are delivered to a subject by intrathecal administration using at least one site. As a non-limiting example, the dose of scAAV particles may be 3×10¹³ vg administered at 3 sites at a volume/rate of 3 ml/3 hours. As another non-limiting example, the dose of scAAV particles may be 1×10¹³ vg or 3×10¹³ vg administered at one site in the L (e.g., L1) or C region at a volume/rate of 10 ml/10 hours. As another non-limiting example, the dose of scAAV particles may be 3×10¹³ vg administered at 3 sites as a bolus infusion. As another non-limiting example, the dose of scAAV particles may be 1×10¹³ vg administered at 1 site as a bolus infusion of 1 ml. As another non-limiting example, the dose of scAAV particles may be 3×10¹³ vg administered at 1 site (e.g., L or C region) as a bolus infusion of 3 ml. As another non-limiting example, the dose of scAAV particles may be 2×10¹³ vg, 2×10¹² vg, 2×10¹¹ vg, or 2×10¹⁰ vg administered at 1 site (e.g., L or C region) as 2 bolus infusions.

[0344] In one embodiment, the AAV particles comprise an AAV6 capsid and are delivered to a subject by intrathecal administration using at least one site. As a non-limiting example, the dose of AAV particles may be 3×10¹³ vg administered at 3 sites at a volume/rate of 3 ml/3 hours. As another non-limiting example, the dose of AAV particles may be 1×10¹³ vg or 3×10¹³ vg administered at one site in the L (e.g., L1) or C region at a volume/rate of 10 ml/10 hours. As another non-limiting example, the dose of AAV particles may be 3×10¹³ vg administered at 3 sites as a bolus infusion. As another non-limiting example, the dose of AAV particles may be 1×10¹³ vg administered at 1 site as a bolus infusion of 1 ml. As another non-limiting example, the dose of AAV particles may be 3×10¹³ vg administered at 1 site (e.g., L or C region) as a bolus infusion of 3 ml. As another non-limiting example, the dose of AAV particles may be 2×10¹³ vg, 2×10¹² vg, 2×10¹¹ vg, or 2×10¹⁰ vg administered at 1 site (e.g., L or C region) as 2 bolus infusions.

[0345] In one embodiment, the AAV particles are ssAAV particles and comprise an AAV6 capsid and are delivered to a subject by intrathecal administration using at least one site. As a non-limiting example, the dose of ssAAV particles may be 3×10¹³ vg administered at 3 sites at a volume/rate of 3 ml/3 hours. As another non-limiting example, the dose of ssAAV particles may be 1×10¹³ vg or 3×10¹³ vg administered at one site in the L (e.g., L1) or C region at a volume/rate of 10 ml/10 hours. As another non-limiting example, the dose of ssAAV particles may be 3×10¹³ vg administered at 3 sites as a bolus infusion. As another non-limiting example, the dose of ssAAV particles may be 1×10¹³ vg administered at 1 site as a bolus infusion of 1 ml. As another non-limiting example, the dose of ssAAV particles may be 3×10¹³ vg administered at 1 site (e.g., L or C region) as a bolus infusion of 3 ml. As another non-limiting example, the dose of ssAAV particles may be 2×10¹³ vg, 2×10¹² vg, 2×10¹¹ vg, or 2×10¹⁰ vg administered at 1 site (e.g., L or C region) as 2 bolus infusions.

[0346] In one embodiment, the AAV particles are scAAV particles and comprise an AAV6 capsid and are delivered to a subject by intrathecal administration using at least one site. As a non-limiting example, the dose of scAAV particles may be 3×10¹³ vg administered at 3 sites at a volume/rate of 3 ml/3 hours. As another non-limiting example, the dose of scAAV particles may be 1×10¹³ vg or 3×10¹³ vg administered at one site in the L (e.g., L1) or C region at a volume/rate of 10 ml/10 hours. As another non-limiting example, the dose of scAAV particles may be 3×10¹³ vg administered at 3 sites as a bolus infusion. As another non-limiting example, the dose of scAAV particles may be 1×10¹³ vg administered at 1 site as a bolus infusion of 1 ml. As another non-limiting example, the dose of scAAV particles may be 3×10¹³ vg administered at 1 site (e.g., L or C region) as a bolus infusion of 3 ml. As another non-limiting example, the dose of scAAV particles may be 2×10¹³ vg, 2×10¹² vg, 2×10¹¹ vg, or 2×10¹⁰ vg administered at 1 site (e.g., L or C region) as 2 bolus infusions.

[0347] In one embodiment, the AAV particles comprise an AAV9 capsid and are delivered to a subject by intrathecal administration using at least one site. As a non-limiting example, the dose of AAV particles may be 3×10¹³ vg administered at 3 sites at a volume/rate of 3 ml/3 hours. As another non-limiting example, the dose of AAV particles may be 1×10¹³ vg or 3×10¹³ vg administered at one site in the L (e.g., L1) or C region at a volume/rate of 10 ml/10 hours. As another non-limiting example, the dose of AAV particles may be 3×10¹³ vg administered at 3 sites as a bolus infusion. As another non-limiting example, the dose of AAV particles may be 1×10¹³ vg administered at 1 site as a bolus infusion of 1 ml. As another non-limiting example, the dose of AAV particles may be 3×10¹³ vg administered at 1 site (e.g., L or C region) as a bolus infusion of 3 ml. As another non-limiting example, the dose of AAV particles may be 2×10¹³ vg, 2×10¹² vg, 2×10¹¹ vg, or 2×10¹⁰ vg administered at 1 site (e.g., L or C region) as 2 bolus infusions.

[0348] In one embodiment, the AAV particles are ssAAV particles and comprise an AAV9 capsid and are delivered to a subject by intrathecal administration using at least one site. As a non-limiting example, the dose of ssAAV particles may be 3×10¹³ vg administered at 3 sites at a volume/rate of 3 ml/3 hours. As another non-limiting example, the dose of ssAAV particles may be 1×10¹³ vg or 3×10¹³ vg administered at one site in the L (e.g., L1) or C region at a volume/rate of 10 ml/10 hours. As another non-limiting example, the dose of ssAAV particles may be 3×10¹³ vg administered at 3 sites as a bolus infusion. As another non-limiting example, the dose of ssAAV particles may be 1×10¹³ vg administered at 1 site as a bolus infusion of 1 ml. As another non-limiting example, the dose of ssAAV particles may be 3×10¹³ vg administered at 1 site (e.g., L or C region) as a bolus infusion of 3 ml. As another non-limiting example, the dose of ssAAV particles may be 2×10¹³ vg, 2×10¹² vg, 2×10¹⁰ vg, or 2×10¹⁰ vg administered at 1 site (e.g., L or C region) as 2 bolus infusions.

[0349] In one embodiment, the AAV particles are scAAV particles and comprise an AAV9 capsid and are delivered to a subject by intrathecal administration using at least one site. As a non-limiting example, the dose of scAAV particles may be 3×10¹³ vg administered at 3 sites at a volume/rate of 3 ml/3 hours. As another non-limiting example, the dose of scAAV particles may be 1×10¹³ vg or 3×10¹³ vg administered at one site in the L (e.g., L1) or C region at a volume/rate of 10 ml/10 hours. As another non-limiting example, the dose of scAAV particles may be 3×10¹³ vg administered at 3 sites as a bolus infusion. As another non-limiting example, the dose of scAAV particles may be 1×10¹³ vg administered at 1 site as a bolus infusion of 1 ml. As another non-limiting example, the dose of scAAV particles may be 3×10¹³ vg administered at 1 site (e.g., L or C region) as a bolus infusion of 3 ml. As another non-limiting example, the dose of scAAV particles may be 2×10¹³ vg, 2×10¹² vg, 2×10¹¹ vg, or 2×10¹⁰ vg administered at 1 site (e.g., L or C region) as 2 bolus infusions.

[0350] In one embodiment, the AAV particles comprise an AAV-DJ capsid and are delivered to a subject by intrathecal administration using at least one site. As a non-limiting example, the dose of AAV particles may be 3×10¹³ vg administered at 3 sites at a volume/rate of 3 ml/3 hours. As another non-limiting example, the dose of AAV particles may be 1×10¹³ vg or 3×10¹³ vg administered at one site in the L (e.g., L1) or C region at a volume/rate of 10 ml/10 hours. As another non-limiting example, the dose of AAV particles may be 3×10¹³ vg administered at 3 sites as a bolus infusion. As another non-limiting example, the dose of AAV particles may be 1×10¹³ vg administered at 1 site as a bolus infusion of 1 ml. As another non-limiting example, the dose of AAV particles may be 3×10¹³ vg administered at 1 site (e.g., L or C region) as a bolus infusion of 3 ml. As another non-limiting example, the dose of AAV particles may be 2×10¹³ vg, 2×10¹² vg, 2×10¹¹ vg, or 2×10¹⁰ vg administered at 1 site (e.g., L or C region) as 2 bolus infusions.

[0351] In one embodiment, the AAV particles are ssAAV particles and comprise an AAV-DJ capsid and are delivered to a subject by intrathecal administration using at least one site. As a non-limiting example, the dose of ssAAV particles may be 3×10¹³ vg administered at 3 sites at a volume/rate of 3 ml/3 hours. As another non-limiting example, the dose of ssAAV particles may be 1×10¹³ vg or 3×10¹³ vg administered at one site in the L (e.g., L1) or C region at a volume/rate of 10 ml/10 hours. As another non-limiting example, the dose of ssAAV particles may be 3×10¹³ vg administered at 3 sites as a bolus infusion. As another non-limiting example, the dose of ssAAV particles may be 1×10¹³ vg administered at 1 site as a bolus infusion of 1 ml. As another non-limiting example, the dose of ssAAV particles may be 3×10¹³ vg administered at 1 site (e.g., L or C region) as a bolus infusion of 3 ml. As another non-limiting example, the dose of ssAAV particles may be 2×10¹³ vg, 2×10¹² vg, 2×10¹¹ vg, or 2×10¹⁰ vg administered at 1 site (e.g., L or C region) as 2 bolus infusions.

[0352] In one embodiment, the AAV particles are scAAV particles and comprise an AAV-DJ capsid and are delivered to a subject by intrathecal administration using at least one site. As a non-limiting example, the dose of scAAV particles may be 3×10¹³ vg administered at 3 sites at a volume/rate of 3 ml/3 hours. As another non-limiting example, the dose of scAAV particles may be 1×10¹³ vg or 3×10¹³ vg administered at one site in the L (e.g., L1) or C region at a volume/rate of 10 ml/10 hours. As another non-limiting example, the dose of scAAV particles may be 3×10¹³ vg administered at 3 sites as a bolus infusion. As another non-limiting example, the dose of scAAV particles may be 1×10¹³ vg administered at 1 site as a bolus infusion of 1 ml. As another non-limiting example, the dose of scAAV particles may be 3×10¹³ vg administered at 1 site (e.g., L or C region) as a bolus infusion of 3 ml. As another non-limiting example, the dose of scAAV particles may be 2×10¹³ vg, 2×10¹² vg, 2×10¹¹ vg, or 2×10¹⁰ vg administered at 1 site (e.g., L or C region) as 2 bolus infusions.

[0353] In one embodiment, the AAV particles comprise an AAV-DJ8 capsid and are delivered to a subject by intrathecal administration using at least one site. As a non-limiting example, the dose of AAV particles may be 3×10¹³ vg administered at 3 sites at a volume/rate of 3 ml/3 hours. As another non-limiting example, the dose of AAV particles may be 1×10¹³ vg or 3×10¹³ vg administered at one site in the L (e.g., L1) or C region at a volume/rate of 10 ml/10 hours. As another non-limiting example, the dose of AAV particles may be 3×10¹³ vg administered at 3 sites as a bolus infusion. As another non-limiting example, the dose of AAV particles may be 1×10¹³ vg administered at 1 site as a bolus infusion of 1 ml. As another non-limiting example, the dose of AAV particles may be 3×10¹³ vg administered at 1 site (e.g., L or C region) as a bolus infusion of 3 ml. As another non-limiting example, the dose of AAV particles may be 2×10¹³ vg, 2×10¹² vg, 2×10¹¹ vg, or 2×10¹⁰ vg administered at 1 site (e.g., L or C region) as 2 bolus infusions.

[0354] In one embodiment, the AAV particles are ssAAV particles and comprise an AAV-DJ8 capsid and are delivered to a subject by intrathecal administration using at least one site. As a non-limiting example, the dose of ssAAV particles may be 3×10¹³ vg administered at 3 sites at a volume/rate of 3 ml/3 hours. As another non-limiting example, the dose of ssAAV particles may be 1×10¹³ vg or 3×10¹³ vg administered at one site in the L (e.g., L1) or C region at a volume/rate of 10 ml/10 hours. As another non-limiting example, the dose of ssAAV particles may be 3×10¹³ vg administered at 3 sites as a bolus infusion. As another non-limiting example, the dose of ssAAV particles may be 1×10¹³ vg administered at 1 site as a bolus infusion of 1 ml. As another non-limiting example, the dose of ssAAV particles may be 3×10¹³ vg administered at 1 site (e.g., L or C region) as a bolus infusion of 3 ml. As another non-limiting example, the dose of ssAAV particles may be 2×10¹³ vg, 2×10¹² vg, 2×10¹¹ vg, or 2×10¹⁰ vg administered at 1 site (e.g., L or C region) as 2 bolus infusions.

[0355] In one embodiment, the AAV particles are scAAV particles and comprise an AAV-DJ8 capsid and are delivered to a subject by intrathecal administration using at least one site. As a non-limiting example, the dose of scAAV particles may be 3×10¹³ vg administered at 3 sites at a volume/rate of 3 ml/3 hours. As another non-limiting example, the dose of scAAV particles may be 1×10¹³ vg or 3×10¹³ vg administered at one site in the L (e.g., L1) or C region at a volume/rate of 10 ml/10 hours. As another non-limiting example, the dose of scAAV particles may be 3×10¹³ vg administered at 3 sites as a bolus infusion. As another non-limiting example, the dose of scAAV particles may be 1×10¹³ vg administered at 1 site as a bolus infusion of 1 ml. As another non-limiting example, the dose of scAAV particles may be 3×10¹³ vg administered at 1 site (e.g., L or C region) as a bolus infusion of 3 ml. As another non-limiting example, the dose of scAAV particles may be 2×10¹³ vg, 2×10¹² vg, 2×10¹⁰ vg, or 2×10¹⁰ vg administered at 1 site (e.g., L or C region) as 2 bolus infusions.

[0356] In one embodiment, the AAV particles are scAAV particles and are delivered by intrathecal administration to a subject using at least one site. As a non-limiting example, the dose of scAAV particles may be 3.4×10¹¹ vg administered bilaterally to the caudate and putamen at a dose a volume of 30 ul/site. As a non-limiting example, the dose of scAAV particles may be 3.4×10¹¹ vg administered bilaterally to the left caudate and right putamen at a dose a volume of 30 ul/site. As a non-limiting example, the dose of scAAV particles may be 3.4×10¹¹ vg administered bilaterally to the right caudate and left putamen at a dose a volume of 30 ul/site. As a non-limiting example, the dose of scAAV particles may be 3.4×10¹¹ vg administered bilaterally to the left caudate and left putamen at a dose a volume of 30 ul/site. As a non-limiting example, the dose of scAAV particles may be 3.4×10¹¹ vg administered bilaterally to the right caudate and right putamen at a dose a volume of 30 ul/site. As a non-limiting example, the dose of scAAV particles may be 1.1×10¹¹ vg administered bilaterally to the caudate and putamen at a dose a volume of 30 ul/site. As a non-limiting example, the dose of scAAV particles may be 1.1×10¹¹ vg administered bilaterally to the left caudate and right putamen at a dose a volume of 30 ul/site. As a non-limiting example, the dose of scAAV particles may be 1.1×10¹¹ vg administered bilaterally to the right caudate and left putamen at a dose a volume of 30 ul/site. As a non-limiting example, the dose of scAAV particles may be 1.1×10¹¹ vg administered bilaterally to the left caudate and left putamen at a dose a volume of 30 ul/site. As a non-limiting example, the dose of scAAV particles may be 1.1×10¹¹ vg administered bilaterally to the right caudate and right putamen at a dose a volume of 30 ul/site. As a non-limiting example, the dose of scAAV particles may be 5.7×10¹⁰ vg administered to either the left or right caudate at a dose a volume of 30 ul/site. As a non-limiting example, the dose of scAAV particles may be 5.7×10¹⁰ vg administered to both the left and right caudate at a dose a volume of 30 ul/site. As a non-limiting example, the dose of scAAV particles may be 5.7×10¹⁰ vg administered to either the left or right putamen at a dose a volume of 30 ul/site. As a non-limiting example, the dose of scAAV particles may be 5.7×10¹⁰ vg administered to both the left and right putamen at a dose a volume of 30 ul/site.

[0357] In one embodiment, the AAV particles are ssAAV particles and are delivered by intrathecal administration to a subject using at least one site. As a non-limiting example, the dose of ssAAV particles may be 3.4×10¹¹ vg administered bilaterally to the caudate and putamen at a dose a volume of 30 ul/site. As a non-limiting example, the dose of ssAAV particles may be 3.4×10¹¹ vg administered bilaterally to the left caudate and right putamen at a dose a volume of 30 ul/site. As a non-limiting example, the dose of ssAAV particles may be 3.4×10¹¹ vg administered bilaterally to the right caudate and left putamen at a dose a volume of 30 ul/site. As a non-limiting example, the dose of ssAAV particles may be 3.4×10¹¹ vg administered bilaterally to the left caudate and left putamen at a dose a volume of 30 ul/site. As a non-limiting example, the dose of ssAAV particles may be 3.4×10¹¹ vg administered bilaterally to the right caudate and right putamen at a dose a volume of 30 ul/site. As a non-limiting example, the dose of ssAAV particles may be 1.1×10¹¹ vg administered bilaterally to the caudate and putamen at a dose a volume of 30 ul/site. As a non-limiting example, the dose of ssAAV particles may be 1.1×10¹¹ vg administered bilaterally to the left caudate and right putamen at a dose a volume of 30 ul/site. As a non-limiting example, the dose of ssAAV particles may be 1.1×10¹¹ vg administered bilaterally to the right caudate and left putamen at a dose a volume of 30 ul/site. As a non-limiting example, the dose of ssAAV particles may be 1.1×10¹¹ vg administered bilaterally to the left caudate and left putamen at a dose a volume of 30 ul/site. As a non-limiting example, the dose of ssAAV particles may be 1.1×10¹¹ vg administered bilaterally to the right caudate and right putamen at a dose a volume of 30 ul/site. As a non-limiting example, the dose of ssAAV particles may be 5.7×10¹⁰ vg administered to either the left or right caudate at a dose a volume of 30 ul/site. As a non-limiting example, the dose of ssAAV particles may be 5.7×10¹⁰ vg administered to both the left and right caudate at a dose a volume of 30 ul/site. As a non-limiting example, the dose of ssAAV particles may be 5.7×10¹⁰ vg administered to either the left or right putamen at a dose a volume of 30 ul/site. As a non-limiting example, the dose of ssAAV particles may be 5.7×10¹⁰ vg administered to both the left and right putamen at a dose a volume of 30 ul/site.

[0358] In one embodiment, the AAV particles comprise an AAV1 capsid are scAAV particles and are delivered by intrathecal administration to a subject using at least one site. As a non-limiting example, the dose of scAAV particles may be 3.4×10¹¹ vg administered bilaterally to the caudate and putamen at a dose a volume of 30 ul/site. As a non-limiting example, the dose of scAAV particles may be 3.4×10¹¹ vg administered bilaterally to the left caudate and right putamen at a dose a volume of 30 ul/site. As a non-limiting example, the dose of scAAV particles may be 3.4×10¹¹ vg administered bilaterally to the right caudate and left putamen at a dose a volume of 30 ul/site. As a non-limiting example, the dose of scAAV particles may be 3.4×10¹¹ vg administered bilaterally to the left caudate and left putamen at a dose a volume of 30 ul/site. As a non-limiting example, the dose of scAAV particles may be 3.4×10¹¹ vg administered bilaterally to the right caudate and right putamen at a dose a volume of 30 ul/site. As a non-limiting example, the dose of scAAV particles may be 1.1×10¹¹ vg administered bilaterally to the caudate and putamen at a dose a volume of 30 ul/site. As a non-limiting example, the dose of scAAV particles may be 1.1×10¹¹ vg administered bilaterally to the left caudate and right putamen at a dose a volume of 30 ul/site. As a non-limiting example, the dose of scAAV particles may be 1.1×10¹¹ vg administered bilaterally to the right caudate and left putamen at a dose a volume of 30 ul/site. As a non-limiting example, the dose of scAAV particles may be 1.1×10¹¹ vg administered bilaterally to the left caudate and left putamen at a dose a volume of 30 ul/site. As a non-limiting example, the dose of scAAV particles may be 1.1×10¹¹ vg administered bilaterally to the right caudate and right putamen at a dose a volume of 30 ul/site. As a non-limiting example, the dose of scAAV particles may be 5.7×10¹⁰ vg administered to either the left or right caudate at a dose a volume of 30 ul/site. As a non-limiting example, the dose of scAAV particles may be 5.7×10¹⁰ vg administered to both the left and right caudate at a dose a volume of 30 ul/site. As a non-limiting example, the dose of scAAV particles may be 5.7×10¹⁰ vg administered to either the left or right putamen at a dose a volume of 30 ul/site. As a non-limiting example, the dose of scAAV particles may be 5.7×10¹⁰ vg administered to both the left and right putamen at a dose a volume of 30 ul/site.

[0359] In one embodiment, the AAV particles comprise an AAV1 capsid are ssAAV particles and are delivered by intrathecal administration to a subject using at least one site. As a non-limiting example, the dose of ssAAV particles may be 3.4×10¹¹ vg administered bilaterally to the caudate and putamen at a dose a volume of 30 ul/site. As a non-limiting example, the dose of ssAAV particles may be 3.4×10¹¹ vg administered bilaterally to the left caudate and right putamen at a dose a volume of 30 ul/site. As a non-limiting example, the dose of ssAAV particles may be 3.4×10¹¹ vg administered bilaterally to the right caudate and left putamen at a dose a volume of 30 ul/site. As a non-limiting example, the dose of ssAAV particles may be 3.4×10¹¹ vg administered bilaterally to the left caudate and left putamen at a dose a volume of 30 ul/site. As a non-limiting example, the dose of ssAAV particles may be 3.4×10¹¹ vg administered bilaterally to the right caudate and right putamen at a dose a volume of 30 ul/site. As a non-limiting example, the dose of ssAAV particles may be 1.1×10¹¹ vg administered bilaterally to the caudate and putamen at a dose a volume of 30 ul/site. As a non-limiting example, the dose of ssAAV particles may be 1.1×10¹¹ vg administered bilaterally to the left caudate and right putamen at a dose a volume of 30 ul/site. As a non-limiting example, the dose of ssAAV particles may be 1.1×10¹¹ vg administered bilaterally to the right caudate and left putamen at a dose a volume of 30 ul/site. As a non-limiting example, the dose of ssAAV particles may be 1.1×10¹¹ vg administered bilaterally to the left caudate and left putamen at a dose a volume of 30 ul/site. As a non-limiting example, the dose of ssAAV particles may be 1.1×10¹¹ vg administered bilaterally to the right caudate and right putamen at a dose a volume of 30 ul/site. As a non-limiting example, the dose of ssAAV particles may be 5.7×10¹⁰ vg administered to either the left or right caudate at a dose a volume of 30 ul/site. As a non-limiting example, the dose of ssAAV particles may be 5.7×10¹⁰ vg administered to both the left and right caudate at a dose a volume of 30 ul/site. As a non-limiting example, the dose of ssAAV particles may be 5.7×10¹⁰ vg administered to either the left or right putamen at a dose a volume of 30 ul/site. As a non-limiting example, the dose of ssAAV particles may be 5.7×10¹⁰ vg administered to both the left and right putamen at a dose a volume of 30 ul/site.

### Continuous/Prolonged Infusion

[0360] In one embodiment, delivery of AAV particles to cells of the central nervous system (e.g., parenchyma) is performed by prolonged intrathecal (IT) infusion (also referred to herein as continuous IT infusion). It has been discovered that intrathecal (IT) administration by prolonged IT infusion (also referred to as IT continuous infusion) leads to stable AAV particle levels within the cerebral spinal fluid (CSF) circulating around the brain and spinal cord by maintaining favorable concentration gradients for AAV particle movement into the parenchyma and increases the total area of spinal cord exposed to efficacious AAV particle concentrations. Consequently, prolonged exposure to the spinal cord will allow for a single site of delivery for widespread neuraxial transfection. Prolonged IT infusion provides increased exposure that favors tissue interactions with AAV by extracellular and intraneuronal processes. As a non-limiting example, the even distribution across targeted neuraxis may avoid hot spots of transduction.

[0361] In one embodiment, IT prolonged infusion comprises delivery by injection into the subarachnoid space, between the arachnoid membrane and pia mater, which comprises the channels through which CSF circulates. IT prolonged infusion comprises delivery to any area of the subarachnoid space including, but not limited to, perivascular space and the subarachnoid space along the entire length of the spinal cord and surrounding the brain. As a non-limiting example, the AAV particles may be used to treat Friedreich's Ataxia (FA), amyotrophic lateral sclerosis (ALS), spinal muscular atrophy (SMA) and/or neuropathic pain.

[0362] In one embodiment, AAV may move along the outside of neural axons including, but not limited to, nerves such as the dorsal and ventral roots that transect the IT space and are bathed by CSF. Intraneuronal exposure comprises uptake and transport within and along the interior of axons towards (retrograde) or away from (anterograde) the neuronal cell body; AAV has been shown to move in both directions dependent on the serotype.

[0363] In one embodiment extracellular ‘paravascular capture’ comprises the inward movement of AAV along blood vessels.

[0364] In some embodiments IT prolonged infusion comprises delivery to the cervical, thoracic, and or lumbar regions of the spine. As used herein, IT prolonged infusion into the spine is defined by the vertebral level at the site of prolonged infusion. In some embodiments IT prolonged infusion comprises delivery to the cervical region of the spine at any location including, but not limited to C1, C2, C3, C4, C5, C6, C7, and/or C8. In some embodiments IT prolonged infusion comprises delivery to the thoracic region of the spine at any location including, but not limited to T1, T2, T3, T3, T4, T5, T6, T7, T8, T9, T10, T11, and/or T12. In some embodiments IT prolonged infusion comprises delivery to the lumbar region of the spine at any location including, but not limited to L1, L2, L3, L3, L4, L5, and/or L6. In some embodiments IT prolonged infusion comprises delivery to the sacral region of the spine at any location including, but not limited to S1, S2, S3, S4, or S5. In some embodiments, delivery by IT prolonged infusion comprises one or more than one site of prolonged infusion.

[0365] In some embodiments, delivery by IT prolonged infusion may comprise 1, 2, 3, 4, 5, 6, 7, 8, 9, 10, 11, 12, 13, 14, 15, 16, 17, 18, 19, 20, 21, 22, 23, 24, or 25 sites of prolonged infusion. In one embodiment, delivery by IT prolonged infusion comprises at least three sites of prolonged infusion. In one embodiment, delivery by IT prolonged infusion consists of three sites of prolonged infusion. In one embodiment, delivery by IT prolonged infusion comprises three sites of prolonged infusion at C1, T1, and L1.

[0366] In one embodiment, delivery by prolonged IT infusion includes administration using a cervical catheter located at C5.

[0367] In one embodiment, delivery by prolonged IT infusion includes administration using a cervical catheter located at C1.

[0368] In one embodiment, delivery by prolonged IT infusion may be via a cervical catheter placed between C1 and C2.

[0369] In one embodiment, delivery by prolonged IT infusion may be via a thoracolumbar catheter placed between T10 and L1.

[0370] In one embodiment, the catheter for prolonged IT infusion may be placed in the cervical region such as, but not limited to, C1-C2.

[0371] In one embodiment, the catheter for prolonged IT infusion may be placed thoracolumbar such as, but not limited to, T10/L1.

[0372] In one embodiment, the catheter for intrathecal delivery may be located in the cervical region. The AAV particles may be delivered in a continuous infusion.

[0373] In one embodiment, the catheter for intrathecal delivery may be located in the lumbar region. The AAV particles may be delivered in a continuous infusion.

[0374] The large size of AAV particles, about 25 nm diameter, leads to steric hindrance wherein there is a limit to the number of AAV particles that may access tissue binding sites and achieve subsequent uptake into cells at any given point in time. Bolus delivery of high numbers of AAV particles over a short period of infusion makes it nearly impossible for much of the delivered AAV dose to reach binding sites for uptake into neurons, astrocytes, oligodendrocytes, microglia and other CNS cells. In contrast, prolonged continuous IT infusion may provide more even and complete distribution of AAV along the neuraxis as AAV concentration reaches equilibrium, thereby reducing the risk of steric hindrance due to the large size of AAV as well as providing a longer timeframe for uptake of AAV into neural cells, tissues, and structures.

[0375] In one embodiment, prolonged IT infusion allows for slower, more controlled infusion that yields more reproducible results as compared to bolus IT delivery which can lead to wastage of AAV drug product and ‘hot spots’ comprising uneven, high levels of transduction along the spinal cord or adjacent dorsal root ganglion.

[0376] In one embodiment, prolonged IT infusion of the AAV particles allows for AAV levels in the spinal cord to approach steady state, i.e., the maximum possible level of particles in the CSF for a given infusion rate and concentration. Steady state for AAV levels is reached when the amount of AAV infused into the CSF is equal to AAV clearance rate. The longer that AAV is delivered at or near steady state, the longer there is maintained a favorable diffusion gradient from CSF into parenchyma, which maximizes the opportunity for particles to be transported via extra- and intra-neuronal routes.

### Bolus Infusion

[0377] In one embodiment, the AAV particles may be delivered to a subject using bolus IT infusion.

[0378] In one embodiment, a subject may be delivered the AAV particles herein by bolus IT infusion at more than one site such as, but not limited to, 2, 3, 4, 5, 6, 7, 8 or more than 8 sites.

[0379] In one embodiment, a subject may be delivered the AAV particles described herein by intrathecal delivery in the lumbar region via a 10 hour bolus injection.

[0380] In one embodiment, the catheter for intrathecal delivery may be located in the cervical region via a bolus infusion.

[0381] In one embodiment, the catheter for intrathecal delivery may be located in the lumbar region via a bolus infusion.

### The Spinal Cord

[0382] The human spinal cord was first mapped by Bruce, 1901 (Bruce, A., 1901. A Topographical Atlas of the Spinal Cord. Williams and Norgate, London, Available from: www.archive.org/details/cu31924024791406 [24.07.14]) and later by others including Sengul et al., 2013 (Sengul, G., Watson, C., Tanaka, I., Paxinos, G., 2013. Atlas of the Spinal Cord of the Rat, Mouse, Marmoset, Rhesus, and Human. Elsevier Academic Press, San Diego), the contents of each of which is herein incorporated by reference in its entirety. The spinal cord can be divided into 5 regions, into an organization which is derived from the adjacent vertebrae: cervical, thoracic, lumbar, sacral, and coccygeal (caudal) as described in Watson et al., 2015 (Neuroscience Research 93 (2015) 164-175 The spinal cord of the common marmoset (Callithrix jacchus) Charles Watson, Gulgun Senguld, Ikuko Tanakae, Zoltan Rusznakb, and Hironobu Tokunoe), and Pardo et al., 2012 (Toxicologic Pathology, 40: 624-636, 2012 “Technical Guide for Nervous System Sampling of the Cynomolgus Monkey for General Toxicity Studies” Ingrid D. Pardo, Robert H. Garman, Klaus Weber, Walter F. Bobrowski, Jerry F. Hardisty, And Daniel Morton), the contents of each of which is herein incorporated by reference in its entirety. The segments in each region and their numbering are shown in Table 2.

[0383] In some instances, rhesus and cynomolgus monkey each have the same number of segments in each region. Rhesus monkey and Cynomolgus monkeys have 7 or 8 segments in the cervical region. Humans have 7 or 8 segments in the cervical region. Humans, Rhesus monkeys and Cynomolgus monkeys have 12 thoracic segments. Humans have 5 lumbar segments while Rhesus and Cynomolgus monkeys have 7 lumbar segments. The sacral region includes 5 segments in humans, but three segments in Cynomolgus monkey and Rhesus monkey. The coccygeal region has 3 segments in rhesus monkey and cynomolgus monkey, and one segment in human.

TABLE 2
Spinal cord segments in human, cynomolgus and rhesus monkeys

| Spinal Cord | | Cynomolgus | Rhesus |
|---|---|---|---|
| Region | Human | Monkey | Monkey |
| Cervical | C1-C7 | C1-C7 | C1-C7 |
| Thoracic | T1-T12 | T1-T12 | T1-T12 |
| Lumbar | L1-L5 | L1-L7 | L1-L7 |
| Sacral | S1-S5 | S1-S3 | S1-S3 |
| Coccygeal (caudal) | Co1 | Co1-3 | Co1-3 |

[0384] Additionally, the spinal cord can also be divided into six regions anatomically and functionally (Sengul et al., 2013 (Sengul, G., Watson, C., Tanaka, I., Paxinos, G., 2013. Atlas of the Spinal Cord of the Rat, Mouse, Marmoset, Rhesus, and Human. Elsevier Academic Press, San Diego), and also Watson et al., Neuroscience Research 93:164-175 (2015)). These regions are the neck muscle region, the upper limb muscle region, the sympathetic outflow region, the lower limb muscle region, the parasympathetic outflow region, and the tail muscle region. These six regions also correlate with territories defined by gene expression during development (see, e.g., Watson et al., supra). The six regions can be defined histologically by the presence or absence of 2 features, the lateral motor column (LMC) and the preganglionic (intermediolateral) column (PGC) (Watson et al., 2015, incorporated herein by reference in its entirety). The limb enlargements are characterized by the presence of a lateral motor column (LMC) and the autonomic regions containing a preganglionic column (PGC). The neck (parabrachial) and tail (caudal) regions have neither an LMC nor a PGC. The limb enlargements and the sympathetic outflow region are marked by particular patterns of hox gene expression in the mouse and chicken, further supporting the division of the spinal cord into these functional regions. Table 3 maps the C, T, L, S and Co designations described in Table 2 to the functional regions according to Sengul et al. and Watson et al. and maps the functional equivalents for Human, Rhesus Monkey, and Japanese Monkey (another macaque). Note: S1 in Rhesus Monkey and L7 in Japanese monkey is located in both crural and postcrural regions.

TABLE 3
Spinal cord regions and sections by function

| Spinal Cord Region | Human | Rhesus Monkey | Japanese Monkey |
|---|---|---|---|
| Neck Muscle Region | C1-C4 (according to | C1-C4 (according to | C1-C3 (as described in |
| (parabrachial region) | Bruce) | Sengul et al.) | Watson et al.) |
| | C1-C3 (according to | | |
| | Sengul et al.) | | |
| Upper limb Region | C5-T1 (according to | C5-T1 (according to | C4-C8 (as described in |
| (brachial region) | Bruce) | Sengul et al.) | Watson et al.) |
| | C4-T1 (according to | | |
| | Sengul et al.) | | |
| Sympathetic outflow | T2-L1 (according to | T2-L3 (according to | T1-L2 (as described in |
| region (postbrachial | Bruce) | Sengul et al.) | Watson et al.) |
| region) | T2-L1 (according to | | |
| | Sengul et al.) | | |
| Lower limb muscle | L2-S2 (according to | L4-S1 (according to | L3-L7 (as described in |
| region (crural region) | Bruce) | Sengul et al.) | Watson et al.) |
| | L3-S2 (according to | | |
| | Sengul et al.) | | |
| Parasympathetic outflow | S3-S4 (according to | S1-S3 (according to | L7-S3 (as described in |
| region (postcrural | Bruce) | Sengul et al.) | Watson et al.) |
| region) | S3-S5 (according to | | |
| | Sengul et al.) | | |
| Tail muscle region | S5-Co1 (according to | Co1-Co3 (according to | Co1-Co3 (as described in |
| (caudal region) | Bruce) | Sengul et al.) | Watson et al.) |
| | Co1 (according to Sengul | | |
| | et al.) | | |

[0385] In one embodiment, a subject may be analyzed for spinal anatomy and pathology prior to delivery of the AAV particles described herein. As a non-limiting example, a subject with scoliosis may have a different dosing regimen and/or catheter location compared to a subject without scoliosis.

[0386] Cross-sections may be labeled according to vertebral segmentation numbering and/or spinal segment numbering. From the mid-thoracic region through the sacral region, the spinal cord is compressed relative to the vertebrae, resulting in a difference of vertebral and spinal levels.

[0387] In one embodiment, a subject may be delivered the AAV particles described herein along the anterior aspect of the spinal cord.

[0388] In one embodiment, a subject may be delivered the AAV particles described herein along the ventral aspect of the spinal cord.

[0389] In one embodiment, the spinal anatomy and pathology of a subject is evaluated prior to delivery of the AAV particles described herein. As shown by Pahlavian et al., the anatomy of the spinal cord can affect the flow of the CSF (see e.g., Pahlavian et al., Plos One 2014; herein incorporated by reference in its entirety). As a non-limiting example, a subject who has scoliosis or scoliosis related symptoms may affect the delivery route, location, regimen, formulation and orientation of the subject in order to ensure a desired AAV distribution.

### IT and ICV Infusion

[0390] In one embodiment, a subject may be delivered the AAV particles herein using intrathecal administration and intracerebroventricular administration.

[0391] In one embodiment, delivery of AAV particles to cells of the central nervous system (e.g., parenchyma) is performed by intracerebroventricular (ICV) prolonged infusion and intrathecal (IT) infusion described herein.

[0392] In one embodiment, the distribution of AAV particles to cells of the central nervous system may be increased by delivery of AAV particles using intrathecal (IT) administration and intracerebroventricular administration as compared to delivery with a single route of administration. The increase may be 1%, 2%, 3%, 4%, 5%, 6%, 7%, 8%, 9%, 10%, 11%, 12%, 13%, 14%, 15%, 16%, 17%, 18%, 19%, 20%, 21%, 22%, 23%, 24%, 25%, 26%, 27%, 28%, 29%, 30%, 31%, 32%, 33%, 34%, 35%, 36%, 37%, 38%, 39%, 40%, 41%, 42%, 43%, 44%, 45%, 46%, 47%, 48%, 49%, 50%, 51%, 52%, 53%, 54%, 55%, 60%, 65%, 70%, 75%, 80%, 85%, 90%, 95% or more than 95%, 1-5%, 1-10%, 1-15%, 1-20%, 5-10%, 5-15%, 5-20%, 5-25%, 10-20%, 10-30%, 15-35%, 20-40%, 20-50%, 30-50%, 30-60%, 40-60%, 40-70%, 50-60%, 50-70%, 60-80%, 60-90%, 70-80%, 70-90%, 80-90%, 80-99% or 90-100%.

[0393] In one embodiment, delivery of AAV particles to cells of the central nervous system (e.g., parenchyma) is performed by delivery to the cerebrospinal fluid (CSF) via intracerebroventricular (ICV) prolonged infusion and intrathecal (IT) infusion described herein.

[0394] In one embodiment, the distribution of AAV particles to spinal column and brain may be increased by delivery of AAV particles using intrathecal (IT) administration and intracerebroventricular administration as compared to delivery with a single route of administration. The increase may be 1%, 2%, 3%, 4%, 5%, 6%, 7%, 8%, 9%, 10%, 11%, 12%, 13%, 14%, 15%, 16%, 17%, 18%, 19%, 20%, 21%, 22%, 23%, 24%, 25%, 26%, 27%, 28%, 29%, 30%, 31%, 32%, 33%, 34%, 35%, 36%, 37%, 38%, 39%, 40%, 41%, 42%, 43%, 44%, 45%, 46%, 47%, 48%, 49%, 50%, 51%, 52%, 53%, 54%, 55%, 60%, 65%, 70%, 75%, 80%, 85%, 90%, 95% or more than 95%, 1-5%, 1-10%, 1-15%, 1-20%, 5-10%, 5-15%, 5-20%, 5-25%, 10-20%, 10-30%, 15-35%, 20-40%, 20-50%, 30-50%, 30-60%, 40-60%, 40-70%, 50-60%, 50-70%, 60-80%, 60-90%, 70-80%, 70-90%, 80-90%, 80-99% or 90-100%.

[0395] In one embodiment, the AAV particles may be delivered to a subject using intracerebroventricular (ICV) and intrathecal (IT) administration to treat a disease or disorder such as, but not limited to, Friedreich's Ataxia (FA), Amyotrophic Lateral Sclerosis (ALS), Spinal Muscular Atrophy (SMA) and/or Neuropathic Pain.

[0396] In one embodiment, a catheter used for ICV and/or IT administration of the AAV particles may include, but is not limited to, the SmartFlow catheter (MRI Interventions), SmartFlow Adjustable Tip Catheter (MRI Interventions), Cleveland Multiport Catheter (Infuseon Therapeutics, Inc.), MEMS catheter (Alcyone Lifesciences, Inc.), Carbothane CED cannula (Renishaw) Smartflow Flex (BrainLab) and/or Intracerebral Microinjection Instrument (IMI) (Atanse).

[0397] In one embodiment, the AAV particles may be delivered via intracerebroventricular (ICV) and/or intrathecal (IT) infusion and therapeutic agent may also be delivered to a subject via intravascular limb infusion in order to deliver the therapeutic agent to the skeletal muscle. Delivery of adeno-associated virus by intravascular limb infusion is described by Gruntman and Flotte (Human Gene Therapy Clinical Development, Vol. 26(3), 2015 159-164; the contents of which is herein incorporated by reference in its entirety).

### Delivery to Cells and Tissues

[0398] The present disclosure provides a method of delivering to a cell or tissue any of the above-described AAV particles, comprising contacting the cell or tissue with said AAV particle or contacting the cell or tissue with a particle comprising said AAV particle, or contacting the cell or tissue with any of the described compositions, including pharmaceutical compositions. The method of delivering the AAV particle to a cell or tissue can be accomplished in vitro, ex vivo, or in vivo.

[0399] In one embodiment, the AAV particles described herein are delivered to the DRG neurons in a volume required for clinical benefit. The AAV particles may be delivered to at least 10%, 15%, 20%, 25%, 30%, 35%, 40%, 45%, 50%, 55%, 60%, 65%, 70%, 75%, 80%, 85%, 90%, 95% or more than 95% of DRG neurons. As a non-limiting example, the AAV particles are delivered to at least 30% of the DRG neurons.

[0400] In one embodiment, the AAV particles may be delivered by a method to provide uniform transduction of the spinal cord and dorsal root ganglion (DRG). As a non-limiting example, the AAV particles may be delivered using intrathecal infusion. The intrathecal infusion may be a bolus infusion or it may be a continuous infusion. As another non-limiting example, the AAV particles are delivered using continuous intrathecal infusion over a period of about 10 hours.

[0401] In one embodiment, delivery of AAV particles comprising a viral genome encoding a payload described herein to sensory neurons in the dorsal root ganglion (DRG), ascending spinal cord sensory tracts, and cerebellum will lead to an increased expression of the encoded payload. The increased expression may lead to improved survival and function of various cell types.

[0402] In one embodiment, delivery of AAV particles comprising a nucleic acid sequence encoding frataxin to sensory neurons in the dorsal root ganglion (DRG), ascending spinal cord sensory tracts, and cerebellum leads to an increased expression of frataxin. The increased expression of frataxin then leads to improved survival, ataxia (balance) and gait, sensory capability, coordination of movement and strength, functional capacity and quality of life and/or improved function of various cell types.

[0403] In one embodiment, DRG and/or cortical brain expression may be higher with shorter, high concentration infusions.

[0404] In one embodiment, the AAV particles comprise a capsid from an AAV serotype which can infiltrate ganglion, there is microgliosis in the spinal cord gray matter and neuronal necrosis and generation in the spinal cord and DRG. As a non-limiting example, the viral genome is self-complementary and the capsid is from the AAVrh10 serotype. As another non-limiting example, the viral genome is single stranded and the capsid is from the AAVrh10 serotype.

[0405] In one embodiment, the AAV particles comprise a capsid from an AAV serotype which can infiltrate ganglion, there is microgliosis in the spinal cord gray matter and neuronal necrosis and generation in the spinal cord and DRG. As a non-limiting example, the viral genome is single stranded and the capsid is from the AAV6 serotype. As a non-limiting example, the viral genome is self-complementary and the capsid is from the AAV6 serotype.

[0406] In one embodiment, the AAV particles comprise a capsid from an AAV serotype which can infiltrate ganglion, there is microgliosis in the spinal cord gray matter and neuronal necrosis and generation in the DRG. As a non-limiting example, the viral genome is single stranded and the capsid is from the AAV9 serotype. As a non-limiting example, the viral genome is self-complementary and the capsid is from the AAV9 serotype. As a non-limiting example, the viral genome is single stranded and the capsid is from the AAV5 serotype. As a non-limiting example, the viral genome is self-complementary and the capsid is from the AAV5 serotype.

[0407] In one embodiment, the AAV particles comprise a capsid from an AAV serotype which can mildly infiltrate ganglion. As a non-limiting example, the viral genome is single stranded and the capsid is from the AAVDJ serotype. As a non-limiting example, the viral genome is self-complementary and the capsid is from the AAVDJ serotype. As a non-limiting example, the viral genome is single stranded and the capsid is from the AAVDJ8 serotype. As a non-limiting example, the viral genome is self-complementary and the capsid is from the AAVDJ8 serotype.

### Delivery Devices

[0408] Devices for administration may be employed for delivery of AAV particles to cells of the central nervous system (e.g., parenchyma) according to the present invention according to single, multi- or split-dosing regimens taught herein.

[0409] Method and devices known in the art for multi-administration to cells, organs and tissues are contemplated for use in conjunction with the methods and compositions disclosed herein as embodiments of the present invention. These include, for example, those methods and devices having multiple needles, hybrid devices employing for example lumens or catheters as well as devices utilizing heat, electric current or radiation driven mechanisms.

[0410] In one embodiment, the AAV particles may administered to a subject using a device to deliver the AAV particles and a head fixation assembly. The head fixation assembly may be, but is not limited to, Leksell, CRW and/or Medtech ROSA, or any of the head fixation assemblies sold by MRI interventions (e.g., SmartFrame), BrainLab (e.g., Kick or Varioguide), Medtronic (e.g., StealthStation). As a non-limiting example, the head fixation assembly may be any of the assemblies described in U.S. Pat. Nos. 8,099,150, 8,548,569 and 9,031,636 and International Patent Publication Nos. WO201108495 and WO2014014585, the contents of each of which are incorporated by reference in their entireties. A head fixation assembly may be used in combination with an MRI compatible drill such as, but not limited to, the MRI compatible drills described in International Patent Publication No. WO2013181008 and US Patent Publication No. US20130325012, the contents of which are herein incorporated by reference in its entirety.

[0411] In one embodiment, the AAV particles may be delivered to a subject using the Clearpoint system from MRI Intervention. The Clearpoint system provides assistance with cannula placement and infusion monitoring, and uses a frame/trajectory device (e.g., SmartFlow trajectory device), and a neuronavigational system that allows for real time adjustment of infusion. The Clearpoint system may be used in combination with a cannula such as, but not limited to, a SmartFlow cannula.

[0412] In one embodiment, the AAV particles may be delivered to a subject using a system which may be used in combination with an MRI and/or in an operating room and provides for MRI monitoring of the infusion and can use neuronavigational software. As a non-limiting example, the delivery systems may allow for surgical times of less than 8 hours. As another non-limiting example, the delivery system can maintain real-time MRI-guided navigation and adjustment and also provides for maximum coverage of the therapeutic area of a subject. As yet another non-limiting example, the delivery system may be used in combination with existing navigation software which is currently commonly used by neurosurgeons.

[0413] In one embodiment, the AAV particles may be delivered to a subject while the subject is wearing a skull frame connected to the skull using burr holes.

[0414] In one embodiment, the AAV particles may be delivered to a subject while the subject is wearing a scalp mounted frame connected to the scalp using key holes. The scalp mounted frame may allow the frame to be reposition if more than one entry site is required for administration (e.g., for an additional infusion).

[0415] In one embodiment, the AAV particles may be delivered to a subject using a trajectory frame as described in US Patent Publication Nos. US20150031982 and US20140066750 and International Patent Publication Nos. WO2015057807 and WO2014039481, the contents of each of which are herein incorporated by reference in their entireties.

[0416] In one embodiment, the AAV particles may be delivered to a subject using a trajectory guide or frame such as, but not limited to, SmartFrame by MRI Interventions, SmartFlow catheter with a bone anchor (BrainLab and MRI Interventions), neuro Convect (Renishaw) Navigus or bone anchor from Medtronic, KB ball guide, Monteris AXiiiS or mini-bolt, and FHC STarFix.

[0417] In one embodiment, the AAV particles may be delivered to a subject using a trajectory guide or frame designed and/or developed by C2C Development, LLC.

[0418] In one embodiment, the AAV particles may be delivered using a method, system and/or computer program for positioning apparatus to a target point on a subject to deliver the AAV particles. As a non-limiting example, the method, system and/or computer program may be the methods, systems and/or computer programs described in U.S. Pat. No. 8,340,743, the contents of which are herein incorporated by reference in its entirety. The method may include: determining a target point in the body and a reference point, wherein the target point and the reference point define a planned trajectory line (PTL) extending through each; determining a visualization plane, wherein the PTL intersects the visualization plane at a sighting point; mounting the guide device relative to the body to move with respect to the PTL, wherein the guide device does not intersect the visualization plane; determining a point of intersection (GPP) between the guide axis and the visualization plane; and aligning the GPP with the sighting point in the visualization plane.

[0419] In one embodiment, a surgical alignment device may be used to deliver the AAV particles to a subject. The surgical alignment device may be a device described herein and/or is known in the art. As a non-limiting example, the surgical alignment device may be controlled remotely (i.e., robotic) such as the alignment devices described in U.S. Pat. Nos. 7,366,561 and 8,083,753, the contents of each of which is incorporated by reference in their entireties.

[0420] In one embodiment, a trajectory guide device may be used in preparation and delivery of the AAV particles described herein. Non-limiting examples of trajectory guide devices include Navigus from Medtronic, Varioguide skull adapter from BrainLab, Neuromate robot from Renishaw, and a ball joint fixture from MRI Interventions.

[0421] In one embodiment, prior to intraparenchymal administration of the AAV particles described herein, neuronavigational software is used to determine the administration site. Non-limiting examples of neuronavigational software includes StealthViz from Medtronic, iPlan from BrainLab and neuro Inspire from Renishaw. As a non-limiting example, the neuronavigational software includes pre-planning and intraoperative modules which may be separate and customizable depending on the procedure being conducted.

[0422] In one embodiment, neuronavigational software, a trajectory guide device, a catheter and imaging analysis is used prior to, during and/or after administration of the AAV particles described herein.

[0423] In one embodiment, the AAV particles may be delivered using an MRI-guided device. Non-limiting examples of MRI-guided devices are described in U.S. Pat. Nos. 9,055,884, 9,042,958, 8,886,288, 8,768,433, 8,396,532, 8,369,930, 8,374,677 and 8,175,677 and US Patent Application No. US20140024927 the contents of each of which are herein incorporated by reference in their entireties. As a non-limiting example, the MRI-guided device may be able to provide data in real time such as those described in U.S. Pat. Nos. 8,886,288 and 8,768,433, the contents of each of which is herein incorporated by reference in its entirety. As another non-limiting example, the MRI-guided device or system may be used with a targeting cannula such as the systems described in U.S. Pat. Nos. 8,175,677 and 8,374,677, the contents of each of which are herein incorporated by reference in their entireties. As yet another non-limiting example, the MRI-guided device includes a trajectory guide frame for guiding an interventional device as described, for example, in U.S. Pat. No. 9,055,884 and US Patent Application No. US20140024927, the contents of each of which are herein incorporated by reference in their entireties.

[0424] In one embodiment the AAV particles may be delivered using an MRI-compatible tip assembly. Non-limiting examples of MRI-compatible tip assemblies are described in US Patent Publication No. US20140275980, the contents of which is herein incorporated by reference in its entirety.

[0425] In one embodiment, the AAV particles may be delivered using an MRI compatible localization and/or guidance system such as, but not limited to, those described in US Patent Publication Nos. US20150223905 and US20150230871, the contents of each of which are herein incorporated by reference in their entireties. As a non-limiting example, the MRI compatible localization and/or guidance systems may comprise a mount adapted for fixation to a patient, a targeting cannula with a lumen configured to attach to the mount so as to be able to controllably translate in at least three dimensions, and an elongate probe configured to snugly advance via slide and retract in the targeting cannula lumen, the elongate probe comprising at least one of a stimulation or recording electrode.

[0426] In one embodiment, a subject may be administered the AAV particles described herein using a catheter. The catheter may be placed in the lumbar region or the cervical region of a subject. As a non-limiting example, the catheter may be placed in the lumbar region of the subject. As another non-limiting example, the catheter may be placed in the cervical region of the subject. As yet another non-limiting example, the catheter may be placed in the high cervical region of the subject. As used herein, the “high cervical region” refers to the region of the spinal cord comprising the cervical vertebrae C1, C2, C3 and C4 or any subset thereof.

[0427] In one embodiment, the catheter may be in located at one site in the spine for delivery. As a non-limiting example, the location may be in the cervical or the lumbar region. The AAV particles may be delivered in a continuous or bolus infusion.

[0428] In one embodiment, the catheter may be located at more than one site in the spine for multi-site delivery. The AAV particles may be delivered in a continuous and/or bolus infusion. Each site of delivery may be a different dosing regimen or the same dosing regimen may be used for each site of delivery. As a non-limiting example, the sites of delivery may be in the cervical and the lumbar region. As another non-limiting example, the sites of delivery may be in the cervical region. As another non-limiting example, the sites of delivery may be in the lumbar region.

[0429] In one embodiment, the AAV particles may be delivered using a catheter which is MRI-compatible. Non-limiting examples of MRI-compatible catheters include those taught in International Patent Publication No. WO2012116265, U.S. Pat. No. 8,825,133 and US Patent Publication No. US20140024909, the contents of each of which are herein incorporated by reference in their entireties.

[0430] In one embodiment, the catheter may be a neuromodulation catheter. Non-limiting examples of neuromodulation catheters include those taught in US Patent Application No. US20150209104 and International Publication Nos. WO2015143372, WO2015113027, WO2014189794 and WO2014150989, the contents of each of which are herein incorporated by reference in their entireties.

[0431] In one embodiment, a catheter used for administration of the AAV particles may include, but is not limited to, the SmartFlow catheter (MRI Interventions), SmartFlow Adjustable Tip Catheter (MRI Interventions), Cleveland Multiport Catheter (Infuseon Therapeutics, Inc.), MEMS catheter (Alcyone Lifesciences, Inc.), Carbothane CED cannula (Renishaw), SmartFlow (BrainLab), Smartflow Flex (BrainLab), neuro Convect (Renishaw) and/or Intracerebral Microinjection Instrument (IMI) (Atanse).

[0432] In one embodiment, the AAV particles described herein may be delivered using a micro-electro-mechanical system (MEMS) catheter from Alcyone. The MEMS catheter may include, more than one Luer connections, stop for desired depth, stiff shaft for stereotactic frames, tip-protector microtip for insertion into stereotactic frame fixtures, micro size wide tip with at least one channel/outlet, backflow stop features, and/or sensor at the tip (e.g., for monitoring pressure at the outlet, oxygen tension, pH, etc.).

[0433] In one embodiment, an intraparenchymal (IPA) catheter from Alcyone may be used to deliver the AAV particles described herein. As a non-limiting example, the catheter is the micro-electro-mechanical-system (MEMS) catheter from Alcyone.

[0434] In one embodiment, the AAV particles described herein may be delivered using an intraparenchymal catheter which may have at least one design feature such as, but not limited to, built in pressure sensor, at least one infusion level (e.g., 1, 2, 3, 4, 5, 6, 7, 8 or more than 8 individual flow channels), compatibility to stereotaxic equipment, MRI-safe with limited flare and good resolution, CED flow rates greater than 10 ul/min, reflux-resistance, and insertion should cause minimal trauma on the subject.

[0435] In another embodiment, an intraparenchymal catheter from Atanse may be used to deliver the AAV particles described herein.

[0436] In one embodiment, the catheter may be one designed and/or developed by C2C Development, LLC.

[0437] In one embodiment, the AAV particles may be delivered using a cannula which is MRI-compatible. Non-limiting examples of MRI-compatible cannulas include those taught in International Patent Publication No. WO2011130107, the contents of which are herein incorporated by reference in its entirety.

[0438] In one embodiment, the AAV particles may be delivered using a rigid cannula with an adjustable fused silica tip which can be manually or automatically extended or retracted during delivery. While not wishing to be bound by theory, the extendable feature of the tip can allow delivery of the AAV particles along the length of a surface such as, but not limited to, the length of a putamen. Optionally, the cannula may be compatible to any stereotaxic navigational system.

[0439] In one embodiment, the AAV particles may be delivered using a flexible cannula which has a rigid tip portion with a stepped design depending on the delivery site. Optionally, a skull adaptor and/or locking mechanism may be used for acute and/or multi-day applications. The cannula may also be compatible with most stereotaxic navigational systems.

[0440] In one embodiment, the AAV particles may be delivered using a rigid cannula which has a single lumen end port with a tapered step to reduce backflow. The cannula has different tip lengths to match the anatomy of the target site for delivery and different diameters to allow for higher flow rates. Optionally, the cannula may be compatible to any stereotaxic navigational system.

[0441] In one embodiment, the AAV particles may be delivered using a flexible carbothane cannula with a recessed step design. More than one cannula may be used to deliver the AAV particles to a subject. Optionally, the cannula may be compatible to any stereotaxic navigational system.

[0442] In one embodiment, the AAV particles may be delivered using a catheter with an inner drug delivery cannula that can extend to infuse at multiple sites surrounding the central catheter.

[0443] In one embodiment, the devices described herein to deliver to a subject the above-described AAV particles may also include a tip protection device (e.g., for catheters and/or stereotactic fixtures of microcatheters). Non-limiting examples of protection devices are described in US Patent Publication No. US20140371711 and International Patent Publication No. WO2014204954, the contents of each of which are herein incorporated by reference in their entireties. The tip protection device may include an elongate body having a central lumen extending longitudinally therethrough, the lumen being sized and configured to slidably receive a catheter, and a locking mechanism configured to selectively maintain the elongate body in a fixed longitudinal position relative to a catheter inserted through the central lumen.

[0444] In one embodiment, the AAV particles may be delivered using an infusion port described herein and/or one that is known in the art.

[0445] In one embodiment, the AAV particles may be delivered using an infusion pump and/or an infusion port. The infusion pump and/or the infusion port may be one described herein or one known in the art such as, but not limited to, SYNCHROMED® II by Medtronic. The infusion pump may be programmed at a fixed rate or a variable rate for controlled delivery. The stability of the AAV particles and formulations thereof as well as the leachable materials should be evaluated prior to use.

[0446] In one embodiment, to reduce peripheral organ exposure, a multi-port catheter may be used to deliver AAV particles. The device may have at least 2 ports to allow for the inflow of the AAV particles and the outflow of the CSF. As a non-limiting example, the inflow port is located near the cervical region and the outflow port is located near the sacral region. As another non-limiting example, the inflow and outflow ports are located to focus delivery to specific spinal segments and limit the distribution of the AAV particles to other CNS regions.

[0447] In one embodiment, a multi-port catheter may be used to deliver AAV particles to treat motor neuron diseases such as, but not limited to, ALS. The multi-port catheter may allow for neuraxial spread of the AAV particles in a subject. The multi-port catheter may have at least 2, 3, 4, 5, 6, 7, 8, 9 or more than 9 ports. As a non-limiting example, the multi-port catheter has 3 ports.

[0448] In one embodiment, a multi-port catheter may be used to deliver AAV particles to treat Friedreich's Ataxia. The multi-port catheter has an inflow port located in the cervical region and an outflow port located in the lumbar region. This isolated spinal cord perfusion limits the spread of the AAV particles.

[0449] In one embodiment, a multi-port catheter may be used to deliver AAV particles to treat neuropathic pain. The multi-port catheter has an inflow port located a predetermined distance from an outflow port in order to provide AAV particles to a specific region of the CNS. The distance between the inflow and outflow port may be centimeters (e.g., 1, 5, 10, 15, 20, 25, 30, 35, 40, 45, 50, 55, 60, 65, 70, 75, 80, 85, 90, 95, 100 or more than 100) or inches (¼, ½, ¾, 1, 2, 3, 4, 5, 6, 7, 8, 9, 10, 11, 12 or more than 12 inches). This isolated segmental perfusion of the AAV particles allows for a reduced dose and spread of the AAV particles.

[0450] In one embodiment, the AAV particles may be delivered using a device with an elongated tubular body and a diaphragm as described in US Patent Publication Nos. US20140276582 and US20140276614, the contents of each of which are herein incorporated by reference in their entireties.

[0451] In some embodiments, delivery of AAV particles to cells of the central nervous system (e.g., parenchyma) comprises a prolonged infusion pump or device. In some embodiments, the device may be a pump or comprise a catheter for administration of compositions of the invention across the blood brain barrier. Such devices include but are not limited to a pressurized olfactory delivery device, iontophoresis devices, multi-layered microfluidic devices, and the like. Such devices may be portable or stationary. They may be implantable or externally tethered to the body or combinations thereof.

[0452] In one embodiment, the AAV particles may be delivered to a subject using a convection-enhanced delivery device. Non-limiting examples of targeted delivery of drugs using convection are described in US Patent Publication Nos. US20100217228, US20130035574 and US20130035660 and International Patent Publication No. WO2013019830 and WO2008144585, the contents of each of which are herein incorporated by reference in their entireties. The convection-enhanced delivery device may be a microfluidic catheter device that may be suitable for targeted delivery of drugs via convection, including devices capable of multi-directional drug delivery, devices that control fluid pressure and velocity using the venturi effect, and devices that include conformable balloons. As a non-limiting example, the convention-enhanced delivery device uses the venturi effect for targeted delivery of drugs as described in US Patent Publication No. US20130035574, the contents of which are herein incorporation by reference in its entirety. As another non-limiting example, the convention-enhanced delivery device uses the conformable balloons for targeted delivery of drugs as described in US Patent Publication No. US20130035660, the contents of which are herein incorporation by reference in its entirety. As another non-limiting example, the convection enhanced delivery device may be a CED catheter from Medgenesis Therapeutix such as those described in International Patent Publication No. WO2008144585 and US Patent No. US20100217228, the contents of each of which are herein incorporated by reference in their entireties. As another non-limiting example, the AAV particles may be in a liposomal composition for convection enhanced delivery such as the liposomal compositions from Medgenesis Therapeutix described in International Patent Publication No. WO2010057317 and US Patent No. US20110274625, the contents of each of which are herein incorporated by reference in their entireties, which may comprise a molar ratio of DSPC:DSPG:CHOL of 7:2:1.

[0453] In one embodiment, the AAV particles may be delivered using an injection device which has a basic form of a stiff tube with holes of a selectable size at selectable places along the tube. This is a device which may be customized depending on the subject or the fluid being delivered. As a non-limiting example, the injection device which comprises a stiff tube with holes of a selectable size and location may be any of the devices described in U.S. Pat. Nos. 6,464,662, 6,572,579 and International Patent Publication No. WO2002007809, the contents of each of which are herein incorporated by reference in their entireties.

[0454] In one embodiment, the AAV particles may be delivered to a defined area using a medical device which comprises a sealing system proximal to the delivery end of the device. Non-limiting examples of medical device with can deliver AAV particles to a defined area includes U.S. Pat. No. 7,998,128, US Patent Application No. US20100030102 and International Patent Publication No. WO2007133776, the contents of each of which are herein incorporated by reference in their entireties.

[0455] In one embodiment, the AAV particle may be delivered over an extended period of time using an extended delivery device. Non-limiting examples of extended delivery devices are described in International Patent Publication Nos. WO2015017609 and WO2014100157, U.S. Pat. No. 8,992,458, and US Patent Publication Nos. US20150038949, US20150133887 and US20140171902, the contents of each of which are herein incorporated by reference in their entireties. As a non-limiting example, the devices used to deliver the AAV particles are CED devices with various features for reducing or preventing backflow as in International Patent Publication No. WO2015017609 and US Patent Publication No. US20150038949, the contents of each of which are herein incorporated by reference in their entireties. As another non-limiting example, the devices used to deliver the AAV particles are CED devices which include a bullet-shaped nose proximal to a distal fluid outlet where the bullet-shaped nose forms a good seal with surrounding tissue and helps reduce or prevent backflow of infused fluid as described in U.S. Pat. No. 8,992,458, US Patent Publication Nos. US20150133887 and US20140171902 and International Patent Publication No. WO2014100157, the contents of each of which are herein incorporated by reference by their entireties. As another non-limiting example, the catheter may be made using micro-electro-mechanical systems (MEMS) technology to reduce backflow as described by Brady et al. (Journal of Neuroscience Methods 229 (2014) 76-83), the contents of which are herein incorporated by reference in its entirety.

[0456] In one embodiment, the AAV particles may be delivered using an implantable delivery device. Non-limiting examples of implantable devices are described by and sold by Codman Neuro Sciences (Le Locle, CH). The implantable device may be an implantable pump such as, but not limited to, those described in U.S. Pat. Nos. 8,747,391, 7,931,642, 7,637,897, and 6,755,814 and US Patent Publication No. US20100069891, the contents of each of which are herein incorporated by reference in their entireties. The implantable device (e.g., a fluidic system) may have the flow rate accuracy of the device optimized by the methods described in U.S. Pat. Nos. 8,740,182 and 8,240,635, and US Patent Publication No. US20120283703, the contents of each of which are herein incorporated by reference in its entirety. As a non-limiting example, the duty cycle of the valve of a system may be optimized to achieve the desired flow rate. The implantable device may have an electrokinetic actuator for adjusting, controlling or programming fine titration of fluid flow through a valve mechanism without intermixing between the electrolyte and fluid. As a non-limiting example, the electrokinetic actuator may be any of those described in U.S. Pat. No. 8,231,563 and US Patent Publication No. US20120283703, the contents of which are herein incorporated by reference in its entirety. Fluids of an implantable infusion pump may be monitored using methods known in the art and those taught in U.S. Pat. No. 7,725,272, the contents of which are herein incorporated by reference in its entirety.

[0457] In one embodiment, a device may be used to deliver the AAV particles where the device creates one or more channels, tunnels or grooves in tissue in order to increase hydraulic conductivity. These channels, tunnels or grooves will allow the AAV particles to flow and produce a predictable infusion pattern. Non-limiting examples of this device is described in U.S. Pat. No. 8,083,720, US Patent Application No. US20110106009, and International Publication No. WO2009151521, the contents of each of which are herein incorporated by reference in its entirety.

[0458] In one embodiment, a pulsar intrathecal delivery device from Alcyone may be used to deliver the AAV particles described herein. The delivery device may include a pump to provide timed infusions of AAV particles to a subject based on the CSF natural pulsation connected to the cardiac cycle of a subject. The device may also include catheter to disrupt the flow of the CSF and/or a sensor (e.g., MEMS sensor, and/or a pressure, heartrate, EKG and/or respiration sensor) to ensure effective infusions. The catheter may be a single lumen catheter or a multi-lumen catheter. Additionally, the device may be connected to a programmable pump that can deliver one or more solutions to a subject.

[0459] In one embodiment, the pulsar intrathecal delivery device from Alcyone may be a multiple port device. The device may include a sensor (e.g., MEMS sensor, and/or a pressure, heartrate, EKG and/or respiration sensor) at each port to ensure effective infusions. The sensor may be the same or different for each port. Additionally, the device with multiple ports may be connected to a programmable pump that can deliver one or more solutions to a subject.

[0460] In one embodiment, an intraparenchymal delivery system from Alcyone may be used to administer the AAV particles described herein. As a non-limiting example, the system may include a distal tip to stop backflow using the properties of the tissue around the administration site.

[0461] In one embodiment, an intrathecal delivery device to deliver the AAV particles descried herein via intrathecal infusion may be a multiple port device to ensure a broad distribution of the AAV particles to the spinal cord and/or brain tissue of the subject. The device may include a sensor (e.g., MEMS sensor, and/or a pressure, heartrate, EKG and/or respiration sensor) at each port to ensure effective infusions. The sensor may be the same or different for each port. Additionally, the device with multiple ports may be connected to a programmable pump that can deliver one or more solutions to a subject.

[0462] In one embodiment, mechanical percussion (e.g., mechanical percussion jacket) on a subject may be used in combination with the administration of the AAV particles described herein. The mechanical percussion device may increase the dispersion of the AAV particles by 1%, 5%, 10%, 15%, 20%, 25%, 30%, 35%, 40%, 45%, 50%, 55%, 60%, 65%, 70%, 75%, 80%, 85%, 90%, 95%, 99% or more than 99% as compared to the distribution of the AAV particles without use of mechanical percussion.

### Spatial Orientation

### Body Angle and Position

[0463] In one embodiment, delivery of AAV particles to cells of the central nervous system (e.g., parenchyma) comprises administration to a horizontal subject. In one embodiment, delivery comprises administration to a vertical subject. In one embodiment, delivery comprises administration to a subject at an angle between approximately horizontal 0° to about vertical 90°. In one embodiment, delivery comprises administration to a subject at an angle of 0°, 1°, 2°, 3° 4°, 5°, 6°, 7°, 8°, 9°, 10°, 11°, 12°, 13°, 14°, 15°, 16°, 17°, 18°, 19°, 20°, 21°, 22°, 23°, 24°, 25°, 26°, 27°, 28°, 29°, 30°, 31°, 32°, 33°, 34°, 35°, 36°, 37°, 38°, 39°, 40°, 41°, 42°, 43°, 44°, 45°, 46°, 47°, 48°, 49°, 50°, 51°, 52°, 53°, 54°, 55°, 56°, 57°, 58°, 59°, 60°, 61°, 62°, 63°, 64°, 65°, 66°, 67°, 68°, 69°, 70°, 71°, 72°, 73°, 74°, 75°, 76°, 77°, 78°, 79°, 80°, 81°, 82°, 83°, 84°, 85°, 86°, 87°, 88°, 89°, 90°.

[0464] In one embodiment, the spine of the subject may be at an angle as compared to the ground during the delivery of the AAV particles subject. The angle of the spine of the subject as compared to the ground may be at least 10, 20, 30, 40, 50, 60, 70, 80, 90, 100, 110, 120, 130, 140, 150 or 180 degrees.

[0465] In one embodiment, delivery of AAV particles to a subject comprises administration of a hyperbaric composition while the subject is in the supine position. As a non-limiting example, the AAV particles described herein may be administered to a subject in the supine position to focus delivery of the AAV particles to the dorsal horn and provide treatment or mitigation of pain.

[0466] In one embodiment, delivery of AAV particles to a subject comprises administration of a hyperbaric composition while the subject is in the prone position. As a non-limiting example, the AAV particles described herein may be administered to a subject in the prone position to focus delivery of the AAV particles to the anterior horn and provide treatment for ALS.

[0467] In one embodiment, delivery of AAV particles to a subject comprises administration of a hyperbaric composition while the subject is in the right lateral recumbent (RLR) position. As a non-limiting example, the AAV particles described herein may be administered to a subject in the RLR position to focus delivery of the AAV particles to the dorsal root ganglion to provide treatment of FA or treatment and mitigation of pain.

[0468] In one embodiment, delivery of AAV particles to a subject comprises administration of a hyperbaric composition while the subject is in the left lateral recumbent (LLR) position. As a non-limiting example, the AAV particles described herein may be administered to a subject in the LLR position to focus delivery of the AAV particles to the dorsal root ganglion to provide treatment of FA or treatment and mitigation of pain.

[0469] In one embodiment, delivery of AAV particles to a subject comprises administration of a hyperbaric composition while the subject is in the Fowler's position. As a non-limiting example, the subject is in a high fowler's position. As another non-limiting example, the subject is in a low fowler's position.

[0470] In one embodiment, delivery of AAV particles to a subject comprises administration of a hyperbaric composition while the subject is in the Trendelenburg position. As a non-limiting example, the AAV particles described herein may be administered to a subject in the Trendelenburg position to focus delivery of the AAV particles to the cervical region of the CNS. In one embodiment, the orientation of the spine subject during delivery of the AAV particles may be vertical to the ground.

### Change in the Orientation/Slope of Subject Body Position Over Time

[0471] In one embodiment, delivery of AAV particles to cells of the central nervous system (e.g., parenchyma) comprises administration to a subject wherein the angle of the subject changes over time from horizontal to vertical head up or vertical head down. In one embodiment, delivery comprises administration to a subject wherein the angle of the subject changes over time from vertical to horizontal.

[0472] In one embodiment, delivery comprises administration to a subject wherein the angle of the subject changes over time in two planes from vertical to horizontal as well as rotation around the long axis of the body. In combination, any % angle of the body can be realized between horizontal to vertical and rotationally left or right.

### Dosing

[0473] The present invention provides methods of administering AAV particles in accordance with the invention to a subject in need thereof. AAV particle pharmaceutical, imaging, diagnostic, or prophylactic compositions thereof, may be administered to a subject using any amount and any route of administration effective for preventing, treating, diagnosing, or imaging a disease, disorder, and/or condition (e.g., a disease, disorder, and/or condition relating to working memory deficits). The exact amount required will vary from subject to subject, depending on the species, age, and general condition of the subject, the severity of the disease, the particular composition, its mode of administration, its mode of activity, and the like. Compositions in accordance with the invention are typically formulated in unit dosage form for ease of administration and uniformity of dosage. It will be understood, however, that the total daily usage of the compositions of the present invention may be decided by the attending physician within the scope of sound medical judgment. The specific therapeutically effective, prophylactically effective, or appropriate imaging dose level for any particular patient will depend upon a variety of factors including the disorder being treated and the severity of the disorder; the activity of the specific payload employed; the specific composition employed; the age, body weight, general health, sex and diet of the patient; the time of administration, route of administration, and rate of excretion of the specific payload employed; the duration of the treatment; drugs used in combination or coincidental with the specific payload employed; and like factors well known in the medical arts.

[0474] In one embodiment, delivery of the AAV particles described herein results in minimal serious adverse events (SAEs) as a result of the delivery of the AAV particles.

[0475] In one embodiment, a subject has had a low incidence of mild to moderate adverse events (AEs) near the time of the administration of the AAV particles. The subject may have had a low incidence of mild to moderate AEs within minutes (e.g., 1, 5, 10, 15, 20, 25, 30, 35, 40, 45, 50, 55 or 60 minutes), hours (1, 2, 3, 4, 5, 6, 7, 8, 9, 10, 11, 12, 13, 14, 15, 16, 17, 18, 19, 20, 21, 22, 23, or 24 hours) or days (1, 2, 3, 4, 5, 6, 7, 8, 9, 10, 11, 12, 13, 14, 15, 16, 17, 18, 19, 20, 21, 22, 23, 24, 25, 26, 27, 28, 29 or 30 days).

[0476] In one embodiment, a subject may be administered the AAV particles described herein using sustained delivery over a period of minutes, hours or days. The infusion rate may be changed depending on the subject, distribution, formulation or another delivery parameter known to those in the art.

[0477] In certain embodiments, AAV particle pharmaceutical compositions in accordance with the present invention may be administered at dosage levels sufficient to deliver from about 0.0001 mg/kg to about 100 mg/kg, from about 0.001 mg/kg to about 0.05 mg/kg, from about 0.005 mg/kg to about 0.05 mg/kg, from about 0.001 mg/kg to about 0.005 mg/kg, from about 0.05 mg/kg to about 0.5 mg/kg, from about 0.01 mg/kg to about 50 mg/kg, from about 0.1 mg/kg to about 40 mg/kg, from about 0.5 mg/kg to about 30 mg/kg, from about 0.01 mg/kg to about 10 mg/kg, from about 0.1 mg/kg to about 10 mg/kg, or from about 1 mg/kg to about 25 mg/kg, of subject body weight per day, one or more times a day, to obtain the desired therapeutic, diagnostic, prophylactic, or imaging effect. It will be understood that the above dosing concentrations may be converted to vg or viral genomes per kg or into total viral genomes administered by one of skill in the art.

[0478] In one embodiment, the total dose of viral genomes delivered to cells of the central nervous system (e.g., parenchyma) defined by the equation [Total Dose VG=VG/mL*mL*# of doses] wherein VG is viral genomes and VG/mL is viral genome concentration. In accordance with the present invention, the total dose may be between about 1×10⁶ VG and about 1×10¹⁶ VG.

[0479] In one embodiment, delivery of AAV particles to cells of the central nervous system (e.g., parenchyma) may comprise a total dose between about 1×10⁶ VG and about 1×10¹⁶ VG. In some embodiments, delivery may comprise a total dose of about 1×10⁶, 2×10⁶, 3×10⁶, 4×10⁶, 5×10⁶, 6×10⁶, 7×10⁶, 8×10⁶, 9×10⁶, 1×10⁷, 2×10⁷, 3×10⁷, 4×10⁷, 5×10⁷, 6×10⁷, 7×10⁷, 8×10⁷, 9×10⁷, 1×10⁸, 2×10⁸, 3×10⁸, 4×10⁸, 5×10⁸, 6×10⁸, 7×10⁸, 8×10⁸, 9×10⁸, 1×10⁹, 2×10⁹, 3×10⁹, 4×10⁹, 5×10⁹, 6×10⁹, 7×10⁹, 8×10⁹, 9×10⁹, 1×10¹⁰, 1.9×10¹⁰, 2×10¹⁰, 3×10¹⁰, 3.73×10¹⁰, 4×10¹⁰, 5×10¹⁰, 6×10¹⁰, 7×10¹⁰, 8×10¹⁰, 9×10¹⁰, 1×10¹¹, 2×10¹¹, 2.5×10¹¹, 3×10¹¹, 4×10¹¹, 5×10¹¹, 6×10¹¹, 7×10¹¹, 8×10¹¹, 9×10¹¹, 1×10¹², 2×10¹², 3×10¹², 4×10¹², 5×10¹², 6×10¹², 7×10¹², 8×10¹², 9×10¹² 1×10¹³, 2×10¹³, 3×10¹³, 4×10¹³, 5×10¹³, 6×10¹³, 7×10¹³, 8×10¹³, 9×10¹³, 1×10¹⁴, 2×10¹⁴, 3×10¹⁴, 4×10¹⁴, 5×10¹⁴, 6×10¹⁴, 7×10¹⁴, 8×10¹⁴, 9×10¹⁴ 1×10¹⁵4, 1×10¹⁵, 2×10¹⁵, 3×10¹⁵, 4×10¹⁵, 5×10¹⁵, 6×10¹⁵, 7×10¹⁵, 8×10¹⁵, 9×10¹⁵, or 1×10¹⁶ VG. As a non-limiting example, the total dose is 1×10¹³ VG. As another non-limiting example, the total dose is 3×10¹³ VG. As another non-limiting example, the total dose is 3.73×10¹⁰ VG. As another non-limiting example, the total dose is 1.9×10¹⁰ VG. As another non-limiting example, the total dose is 2.5×10¹¹ VG. As another non-limiting example, the total dose is 5×10¹¹ VG. As another non-limiting example, the total dose is 1×10¹² VG. As another non-limiting example, the total dose is 5×10¹² VG.

[0480] In one embodiment, delivery of AAV particles to cells of the central nervous system (e.g., parenchyma) may comprise a composition concentration between about 1×10⁶ VG/mL and about 1×10¹⁶ VG/mL. In some embodiments, delivery may comprise a composition concentration of about 1×10⁶, 2×10⁶, 3×10⁶, 4×10⁶, 5×10⁶, 6×10⁶, 7×10⁶, 8×10⁶, 9×10⁶, 1×10⁷, 2×10⁷, 3×10⁷, 4×10⁷, 5×10⁷, 6×10⁷, 7×10⁷, 8×10⁷, 9×10⁷, 1×10⁸, 2×10⁸, 3×10⁸, 4×10⁸, 5×10⁸, 6×10⁸, 7×10⁸, 8×10⁸, 9×10⁸, 1×10⁹, 2×10⁹, 3×10⁹, 4×10⁹, 5×10⁹, 6×10⁹, 7×10⁹, 8×10⁹, 9×10⁹, 1×10¹⁰, 2×10¹⁰, 3×10¹⁰, 4×10¹⁰, 5×10¹⁰, 6×10¹⁰, 7×10¹⁰, 8×10¹⁰, 9×10¹⁰, 1×10¹¹, 2×10¹¹, 3×10¹¹, 4×10¹¹, 5×10¹¹, 6×10¹¹, 7×10¹¹, 8×10¹¹, 9×10¹¹, 1×10¹², 2×10¹², 3×10¹², 4×10¹², 5×10¹², 6×10¹², 7×10¹², 8×10¹², 9×10¹², 1×10¹³, 2×10¹³, 3×10¹³, 4×10¹³, 5×10¹³, 6×10¹³, 7×10¹³ 8×10¹³, 9×10¹³ 1×10¹⁴, 2×10¹⁴, 3×10¹⁴, 4×10¹⁴, 5×10¹⁴, 6×10¹⁴, 7×10¹⁴, 8×10¹⁴, 9×10¹⁴, 1×10¹⁵, 2×10¹⁵, 3×10¹⁵, 4×10¹⁵, 5×10¹⁵, 6×10¹⁵, 7×10¹⁵, 8×10¹⁵, 9×10¹⁵, or 1×10¹⁶ VG/mL. In one embodiment, the delivery comprises a composition concentration of 1×10¹³ VG/mL. In one embodiment, the delivery comprises a composition concentration of 3×10¹² VG/mL.

[0481] In one embodiment, delivery of AAV particles to cells of the central nervous system (e.g., parenchyma) may comprise a composition concentration between about 1×10⁶ VG/uL and about 1×10¹⁶ VG/uL. In some embodiments, delivery may comprise a composition concentration of about 1×10⁶, 2×10⁶, 3×10⁶, 4×10⁶, 5×10⁶, 6×10⁶, 7×10⁶, 8×10⁶, 9×10⁶, 1×10⁷, 2×10⁷, 3×10⁷, 4×10⁷, 5×10⁷, 6×10⁷, 7×10⁷, 8×10⁷, 9×10⁷, 1×10⁸, 2×10⁸, 3×10⁸, 4×10⁸, 5×10⁸, 6×10⁸, 7×10⁸, 8×10⁸, 9×10⁸, 1×10⁹, 2×10⁹, 3×10⁹, 4×10⁹, 5×10⁹, 6×10⁹, 7×10⁹, 8×10⁹, 9×10⁹, 1×10¹⁰, 2×10¹⁰, 3×10¹⁰, 4×10¹⁰, 5×10¹⁰, 6×10¹⁰, 7×10¹⁰, 8×10¹⁰, 9×10¹⁰, 1×10¹¹, 2×10¹¹, 3×10¹¹, 4×10¹¹, 5×10¹¹, 6×10¹¹, 7×10¹¹, 8×10¹¹, 9×10¹¹, 1×10¹², 2×10¹², 3×10¹², 4×10¹², 5×10¹², 6×10¹², 7×10¹², 8×10¹², 9×10¹², 1×10¹³, 2×10¹³, 3×10¹³, 4×10¹³, 5×10¹³, 6×10¹³, 7×10¹³, 8×10¹³, 9×10¹³, 1×10¹⁴, 2×10¹⁴ 3×10¹⁴, 4×10¹⁴, 5×10¹⁴, 6×10¹⁴, 7×10¹⁴, 8×10¹⁴, 9×10¹⁴, 1×10¹⁵, 2×10¹⁵, 3×10¹⁵, 4×10¹⁵, 5×10¹⁵, 6×10¹⁵, 7×10¹⁵, 8×10¹⁵, 9×10¹⁵, or 1×10¹⁶ VG/uL. In one embodiment, the delivery comprises a composition concentration of 1×10¹³ VG/uL. In one embodiment, the delivery comprises a composition concentration of 3×10¹² VG/uL. In one embodiment, the delivery comprises a composition concentration of 1.9×10¹⁰ VG/10 uL. In one embodiment, the delivery comprises a composition concentration of 2.5×10¹¹ VG/100 uL. In one embodiment, the delivery comprises a composition concentration of 5×10¹¹ VG/100 uL.

[0482] In one embodiment, delivery of AAV particles to cells of the central nervous system (e.g., parenchyma) may comprise a total dose between about 1×10⁶ VG and about 1×10¹⁶ VG. In some embodiments, delivery may comprise a total dose of about 1×10⁶, 2×10⁶, 3×10⁶, 4×10⁶, 5×10⁶, 6×10⁶, 7×10⁶, 8×10⁶, 9×10⁶, 1×10⁷, 2×10⁷, 3×10⁷, 4×10⁷, 5×10⁷, 6×10⁷, 7×10⁷, 8×10⁷, 9×10⁷, 1×10⁸, 2×10⁸, 3×10⁸, 4×10⁸, 5×10⁸, 6×10⁸, 7×10⁸, 8×10⁸, 9×10⁸, 1×10⁹, 1.9×10⁹, 2×10⁹, 3×10⁹, 4×10⁹, 5×10⁹, 6×10⁹, 7×10⁹, 8×10⁹, 9×10⁹, 1×10¹⁰, 2×10¹⁰, 3×10¹⁰, 4×10¹⁰, 5×10¹⁰, 6×10¹⁰, 7×10¹⁰, 8×10¹⁰, 9×10¹⁰, 1×10¹¹, 2×10¹¹, 2.5×10¹¹, 3×10¹¹, 4×10¹¹, 5×10¹¹, 6×10¹¹, 7×10¹¹, 8×10¹¹, 9×10¹¹, 1×10¹², 2×10¹², 3×10¹², 4×10¹², 5×10¹², 6×10¹², 7×10¹², 8×10¹², 9×10¹², 1×10¹³, 2×10¹³ 3×10¹³ 4 5×10¹³ 5 6×10¹³ 6 7×10¹³, 7×10¹³ 8×10¹³, 9×10¹³, 1×10¹⁴, 2×10¹⁴, 3×10¹⁴, 4×10¹⁴, 5×10¹⁴, 6×10¹⁴, 7×10¹⁴, 8×10¹⁴, 9×10¹⁴, 1×10¹⁵, 2×10¹⁵, 3×10¹⁵, 4×10¹⁵, 5×10¹⁵, 6×10¹⁵, 7×10¹⁵, 8×10¹⁵, 9×10¹⁵, or 1×10¹⁶ VG. As a non-limiting example, the total dose is 1×10¹³ VG. As another non-limiting example, the total dose is 3×10¹³ VG. As another non-limiting example, the total dose is 3.73×10¹⁰ VG. As another non-limiting example, the total dose is 1.9×10¹⁰ VG. As another non-limiting example, the total dose is 2.5×10¹¹ VG. As another non-limiting example, the total dose is 5×10¹¹ VG. As another non-limiting example, the total dose is 1×10¹² VG. As another non-limiting example, the total dose is 5×10¹² VG. As another non-limiting example, the total dose is 3×10¹⁴ VG. As another non-limiting example, the total dose is 4×10¹³ VG.

[0483] In one embodiment, delivery of AAV particles to cells of the central nervous system (e.g., parenchyma) comprises a total dose of 5×10¹⁰ VG. In one embodiment, delivery consists of a total dose of 5×10¹⁰ VG. In one embodiment, delivery comprises a total dose of 3×10¹³ VG. In one embodiment, delivery of AAV to cells of the central nervous system (e.g., parenchyma) consists of a total dose of 3×10¹³ VG.

[0484] In one embodiment, the dosage delivered to a subject may take into account the amount of backflow of the substance. As a non-limiting example, the method for determining the backflow of a substance or fluid along a track of a delivery device is described in U.S. Pat. Nos. 7,742,630, 7,715,902 and European Publication No. EP1788498, the contents of each of which is herein incorporated by reference in their entireties. As a non-limiting example, a method of reducing the amount of backflow which is described in US Patent Publication No. US20140243783, the contents of which are herein incorporated by reference in its entirety, may be used to reduce the backflow from the administration of composition comprising AAV particles described herein.

[0485] In one embodiment, the ratio of the volume of distribution and the volume infused is at least 1:1, 1:2, 1:3, 1:4, 1:5, 2:1, 2:2, 2:3, 2:4, 2:5, 3:1, 3:2, 3:3, 3:4, 3:5, 4:1, 4:2, 4:3, 4:4, 4:5, 5:1, 5:2, 5:3, 5:4, or 5:5. As a non-limiting example, the ratio of the volume of distribution is at least 3:1.

### Infusion Parameters and Volume

[0486] In some embodiments, infusion volume, duration of infusion, infusion patterns and rates for delivery of AAV particles to cells of the central nervous system (e.g., parenchyma) may be determined and regulated.

[0487] In one embodiment, delivery of AAV particles to cells of the central nervous system (e.g., parenchyma) comprises infusion of at least one dose.

[0488] In one embodiment, delivery of AAV to cells of the central nervous system (e.g., parenchyma) may comprise an infusion of 1, 2, 3, 4, 5, 6, 7, 8, 9, or 10 dose(s). The infusion may be a bolus or prolonged infusion.

[0489] In one embodiment, delivery of AAV particles to cells of the central nervous system (e.g., parenchyma) comprises infusion of up to 1 mL. The infusion may be at least 0.1 mL, 0.2 mL, 0.3 mL, 0.4 mL, 0.5 mL, 0.6 mL, 0.7 mL, 0.8 mL, 0.9 mL, 1 mL or the infusion may be 0.1-0.2 mL, 0.1-0.3 mL, 0.1-0.4 mL, 0.1-0.5 mL, 0.1-0.6 mL, 0.1-0.7 mL, 0.1-0.8 mL, 0.1-0.9 mL, 0.1-1 mL, 0.2-0.3 mL, 0.2-0.4 mL, 0.2-0.5 mL, 0.2-0.6 mL, 0.2-0.7 mL, 0.2-0.8 mL, 0.2-0.9 mL, 0.2-1 mL, 0.3-0.4 mL, 0.3-0.5 mL, 0.3-0.6 mL, 0.3-0.7 mL, 0.3-0.8 mL, 0.3-0.9 mL, 0.3-1 mL, 0.4-0.5 mL, 0.4-0.6 mL, 0.4-0.7 mL, 0.4-0.8 mL, 0.4-0.9 mL, 0.4-1 mL, 0.5-0.6 mL, 0.5-0.7 mL, 0.5-0.8 mL, 0.5-0.9 mL, 0.5-1 mL, 0.6-0.7 mL, 0.6-0.8 mL, 0.6-0.9 mL, 0.6-1 mL, 0.7-0.8 mL, 0.7-0.9 mL, 0.7-1 mL, 0.8-0.9 mL, 0.8-1 mL, or 0.9-1 mL.

[0490] In one embodiment, delivery of AAV particles to cells of the central nervous system (e.g., parenchyma) comprises infusion of between about 1 mL to about 120 mL. The infusion may be 1-5 mL, 1-10 mL, 1-15 mL, 1-20 mL, 1-25 mL, 1-30 mL, 1-35 mL, 1-40 mL, 1-45 mL, 1-50 mL, 1-55 mL, 1-60 mL, 1-65 mL, 1-70 mL, 1-75 mL, 1-80 mL, 1-85 mL, 1-90 mL, 1-95 mL, 1-100 mL, 1-105 mL, 1-110 mL, 1-115 mL, 1-120 mL, 5-10 mL, 5-15 mL, 5-20 mL, 5-25 mL, 1-30 mL, 5-35 mL, 5-40 mL, 5-45 mL, 5-50 mL, 5-55 mL, 5-60 mL, 5-65 mL, 5-70 mL, 5-75 mL, 5-80 mL, 5-85 mL, 5-90 mL, 5-95 mL, 5-100 mL, 5-105 mL, 5-110 mL, 5-115 mL, 1-120 mL, 10-15 mL, 10-20 mL, 10-25 mL, 10-30 mL, 10-35 mL, 10-40 mL, 10-45 mL, 10-50 mL, 10-55 mL, 10-60 mL, 10-65 mL, 10-70 mL, 10-75 mL, 10-80 mL, 10-85 mL, 10-90 mL, 10-95 mL, 10-100 mL, 10-105 mL, 10-110 mL, 10-115 mL, 10-120 mL 15-20 mL, 15-25 mL, 15-30 mL, 15-35 mL, 15-40 mL, 15-45 mL, 15-50 mL, 15-55 mL, 15-60 mL, 15-65 mL, 15-70 mL, 15-75 mL, 15-80 mL, 15-85 mL, 15-90 mL, 15-95 mL, 15-100 mL, 15-105 mL, 15-110 mL, 15-115 mL, 15-120 mL, 20-25 mL, 20-30 mL, 20-35 mL, 20-40 mL, 20-45 mL, 20-50 mL, 20-55 mL, 20-60 mL, 20-65 mL, 20-70 mL, 20-75 mL, 20-80 mL, 20-85 mL, 20-90 mL, 20-95 mL, 20-100 mL, 20-105 mL, 20-110 mL, 20-115 mL, 20-120 mL, 25-30 mL, 25-35 mL, 25-40 mL, 25-45 mL, 25-50 mL, 25-55 mL, 25-60 mL, 25-65 mL, 25-70 mL, 25-75 mL, 25-80 mL, 25-85 mL, 25-90 mL, 25-95 mL, 25-100 mL, 25-105 mL, 25-110 mL, 25-115 mL, 25-120 mL, 30-35 mL, 30-40 mL, 30-45 mL, 30-50 mL, 30-55 mL, 30-60 mL, 30-65 mL, 30-70 mL, 30-75 mL, 30-80 mL, 30-85 mL, 30-90 mL, 30-95 mL, 30-100 mL, 30-105 mL, 30-110 mL, 30-115 mL, 30-120 mL, 35-40 mL, 35-45 mL, 35-50 mL, 35-55 mL, 35-60 mL, 35-65 mL, 35-70 mL, 35-75 mL, 35-80 mL, 35-85 mL, 35-90 mL, 35-95 mL, 35-100 mL, 35-105 mL, 35-110 mL, 35-115 mL, 35-120 mL, 40-45 mL, 40-50 mL, 40-55 mL, 40-60 mL, 40-65 mL, 40-70 mL, 40-75 mL, 40-80 mL, 40-85 mL, 40-90 mL, 40-95 mL, 40-100 mL, 40-105 mL, 40-110 mL, 40-115 mL, 40-120 mL, 45-50 mL, 45-55 mL, 45-60 mL, 45-65 mL, 45-70 mL, 45-75 mL, 45-80 mL, 45-85 mL, 45-90 mL, 45-95 mL, 45-100 mL, 45-105 mL, 45-110 mL, 45-115 mL, 45-120 mL, 50-55 mL, 50-60 mL, 50-65 mL, 50-70 mL, 50-75 mL, 50-80 mL, 50-85 mL, 50-90 mL, 50-95 mL, 50-100 mL, 50-105 mL, 50-110 mL, 50-115 mL, 50-120 mL, 55-60 mL, 55-65 mL, 55-70 mL, 55-75 mL, 55-80 mL, 55-85 mL, 55-90 mL, 55-95 mL, 55-100 mL, 55-105 mL, 55-110 mL, 55-115 mL, 55-120 mL, 60-65 mL, 60-70 mL, 60-75 mL, 60-80 mL, 60-85 mL, 60-90 mL, 60-95 mL, 60-100 mL, 60-105 mL, 60-110 mL, 60-115 mL, 60-120 mL, 65-70 mL, 65-75 mL, 65-80 mL, 65-85 mL, 65-90 mL, 65-95 mL, 65-100 mL, 65-105 mL, 65-110 mL, 65-115 mL, 65-120 mL, 70-75 mL, 70-80 mL, 70-85 mL, 70-90 mL, 70-95 mL, 70-100 mL, 70-105 mL, 70-110 mL, 70-115 mL, 70-120 mL, 75-80 mL, 75-85 mL, 75-90 mL, 75-95 mL, 75-100 mL, 75-105 mL, 75-110 mL, 75-115 mL, 75-120 mL, 80-85 mL, 80-90 mL, 80-95 mL, 80-100 mL, 80-105 mL, 80-110 mL, 80-115 mL, 80-120 mL, 85-90 mL, 85-95 mL, 85-100 mL, 85-105 mL, 85-110 mL, 85-115 mL, 85-120 mL, 90-95 mL, 90-100 mL, 90-105 mL, 90-110 mL, 90-115 mL, 90-120 mL, 95-100 mL, 95-105 mL, 95-110 mL, 95-115 mL, 95-120 mL, 100-105 mL, 100-110 mL, 100-115 mL, 100-120 mL, 105-110 mL, 105-115 mL, 105-120 mL, 110-115 mL, 110-120 mL, or 115-120 mL.

[0491] In one embodiment, delivery of AAV particles to cells of the central nervous system (e.g., parenchyma) may comprise an infusion of about 0.1, 1, 2, 3, 4, 5, 6, 7, 8, 9, 10, 11, 12, 13, 14, 15, 16, 17, 18, 19, 20, 21, 22, 23, 24, 25, 26, 27, 28, 29, 30, 31, 32, 33, 34, 35, 36, 37, 38, 39, 40, 41, 42, 43, 44, 45, 46, 47, 48, 49, 50, 51, 52, 53, 54, 55, 56, 57, 58, 59, 60, 61, 62, 63, 64, 65, 66, 67, 68, 69, 70, 71, 72, 73, 74, 75, 76, 77, 78, 79, 80, 81, 82, 83, 84, 85, 86, 87, 88, 89, 90, 91, 92, 93, 94, 95, 96, 97, 98, 99, 100, 101, 102, 103, 104, 105, 106, 107, 108, 109, 110, 111, 112, 113, 114, 115, 116, 117, 118, 119, or 120 mL. In one embodiment, delivery of AAV particles to cells of the central nervous system (e.g., parenchyma) comprises of infusion of 1 mL.

[0492] In one embodiment, delivery of AAV particles to cells of the central nervous system (e.g., parenchyma) comprises of infusion of at least 1 mL. In one embodiment, delivery of AAV particles to cells of the central nervous system (e.g., parenchyma) comprises infusion of at least 3 mL. In one embodiment, delivery of AAV particles to cells of the central nervous system (e.g., parenchyma) comprises of infusion of 3 mL. In one embodiment, delivery of AAV particles to cells of the central nervous system (e.g., parenchyma) comprises infusion of at least 10 mL. In one embodiment, delivery of AAV particles to cells of the central nervous system (e.g., parenchyma) consists of infusion of 10 mL.

### Infusion Compositions

[0493] In some embodiments, a composition comprising AAV particles delivered to cells of the central nervous system (e.g., parenchyma) may have a certain range of concentrations, pH, baricity (i.e. density of solution), osmolarity, temperature, and other physiochemical and biochemical properties that benefit the delivery of AAV particles to cells of the central nervous system (e.g., parenchyma).

### Duration of Infusion

### Bolus Infusion

[0494] In one embodiment, a subject may be administered the AAV particles described herein using a bolus infusion. As used herein, a “bolus infusion” means a single and rapid infusion of a substance or composition.

[0495] In one embodiment, delivery of AAV particles to cells of the central nervous system (e.g., parenchyma) comprises infusion by bolus injection with a duration of less than 30 minutes. In one embodiment, infusion by bolus injection comprises injection with a duration of less than 20 minutes. In one embodiment, infusion by bolus injection comprises injection with a duration of less than 10 minutes. In one embodiment, infusion by bolus injection comprises injection with a duration of less than 10 seconds. In one embodiment, infusion by bolus injection comprises injection with a duration of between 10 seconds to 10 minutes. In one embodiment, infusion by bolus injection comprises injection with a duration of 10 minutes. In one embodiment, infusion by bolus injection consists of injection with a duration of 10 minutes.

[0496] In one embodiment, delivery of AAV particles to cells of the central nervous system (e.g., parenchyma) comprises infusion by at least one bolus injection. In one embodiment, delivery may comprise infusion by 1, 2, 3, 4, 5, 6, 7, 8, 9, or 10 bolus injections. In one embodiment, delivery may comprise infusion by at least three bolus injections. In one embodiment, delivery comprises infusion by three bolus injections. In one embodiment, delivery of AAV to cells of the central nervous system (e.g., parenchyma) consists of infusion by three bolus injections.

[0497] In one embodiment, delivery of AAV particles to cells of the central nervous system (e.g., parenchyma) comprising infusion of more than one bolus injection further comprises an interval of at least one hour between injections. The interval may be 1, 2, 3, 4, 5, 6, 7, 8, 9, 10, 11, 12, 13, 14, 15, 16, 17, 18, 19, 20, 21, 22, 23, 24, 30, 36, 42, 48, 54, 60, 66, 72, 78, 84, 90, 96, 108, or 120 hour(s) between injections.

[0498] In one embodiment, delivery comprising infusion of more than one bolus injection further comprises an interval of one hour between injections.

[0499] In one embodiment, delivery consists of infusion by three bolus injections at an interval of one hour.

[0500] In one embodiment, delivery of the AAV particles described herein is a multi-level bolus with a controlled withdrawal of the catheter. As a non-limiting example, the initial administration of the AAV particles occurs at C2 and the final administration occurs at L5. As a non-limiting example, the administration of the AAV particles occurs at C2, C6, T6, L1 and the final administration occurs at L5.

### Prolonged or Continuous Infusion

[0501] In one embodiment, delivery of AAV particles to cells of the central nervous system (e.g., parenchyma) comprises prolonged or continuous infusion of pharmaceutically acceptable composition comprising AAV particles.

[0502] In one embodiment, delivery comprises prolonged infusion of one dose. In another embodiment, delivery comprises prolonged infusion of two or more doses.

[0503] In one embodiment, delivery of AAV particles to cells of the central nervous system (e.g., parenchyma) comprises prolonged or continuous infusion of pharmaceutically acceptable composition comprising AAV particles over a duration of at least 10 minutes. As used herein, continuous infusion, also referred to as prolonged infusion and prolonged continuous infusion, refer to a single infusion of a substance or composition over a period of time of at least 10 minutes.

[0504] In one embodiment, delivery comprises prolonged infusion over a duration of between 30 minutes and 60 minutes.

[0505] In one embodiment, delivery comprises prolonged infusion over a duration of one hour.

[0506] In one embodiment, delivery of AAV particles to cells of the central nervous system (e.g., parenchyma) consists of prolonged infusion over a duration of one hour.

[0507] In one embodiment, delivery may comprise prolonged infusion of over a duration of 0.17, 0.33, 0.5, 0.67, 0.83, 1, 2, 3, 4, 5, 6, 7, 8, 9, 10, 11, 12, 13, 14, 15, 16, 17, 18, 19, 20, 21, 22, 23, 24, 25, 26, 27, 28, 29, 30, 31, 32, 33, 34, 35, 36, 37, 38, 39, 40, 41, 42, 43, 44, 45, 46, 47, 48, 49, 50, 51, 52, 53, 54, 55, 56, 57, 58, 59, 60, 61, 62, 63, 64, 65, 66, 67, 68, 69, 70, 71, 72, 73, 74, 75, 76, 77, 78, 79, 80, 81, 82, 83, 84, 85, 86, 87, 88, 89, 90, 91, 92, 93, 94, 95, 96, 97, 98, 99, 100, 101, 102, 103, 104, 105, 106, 107, 108, 109, 110, 111, 112, 113, 114, 115, 116, 117, 118, 119, 120, 121, 122, 123, 124, 125 or more than 125 hour(s).

[0508] In one embodiment, delivery of AAV particles to cells of the central nervous system (e.g., parenchyma) comprises prolonged infusion over a duration of 10 hours. In one embodiment, delivery of AAV particles to cells of the central nervous system (e.g., parenchyma) consists of prolonged infusion over a duration of 10 hours. In one embodiment, prolonged infusion may yield more homogenous levels of protein expression across the spinal cord, as compared to bolus dosing at one or multiple sites. In one embodiment, dentate nucleus expression may increase with prolonged infusions.

[0509] In one embodiment, delivery of AAV particles to cells of the central nervous system (e.g., parenchyma) comprises prolonged infusion of at least one dose, or two or more doses. The interval between doses may be at least one hour, or between 1 hour and 120 hours.

[0510] In one embodiment, delivery of AAV particles to cells of the central nervous system (e.g., parenchyma) comprising prolonged infusion of more than one dose further comprises an interval of at least one hour between doses. In one embodiment, delivery may comprise an interval of 1, 2, 3, 4, 5, 6, 7, 8, 9, 10, 11, 12, 13, 14, 15, 16, 17, 18, 19, 20, 21, 22, 23, 24, 30, 36, 42, 48, 54, 60, 66, 72, 78, 84, 90, 96, 108, or 120 hour(s) between doses. In one embodiment, delivery comprises an interval of 24 hours between doses. In one embodiment, delivery consists of three prolonged infusion doses at an interval of 24 hours.

[0511] In one embodiment, delivery of AAV particles to cells of the central nervous system (e.g., parenchyma) comprises a rate of delivery may be defined by [VG/hour=mL/hour*VG/mL] wherein VG is viral genomes, VG/mL is composition concentration, and mL/hour is rate of prolonged infusion. In accordance with the present invention, the

[0512] In one embodiment, delivery of AAV to cells of the central nervous system (e.g., parenchyma) may comprise a rate of prolonged infusion between about 0.1 mL/hour and about 25.0 mL/hour (or higher if CSF pressure does not increase to dangerous levels). In some embodiments, delivery may comprise a rate of prolonged infusion of about 0.1, 0.2, 0.3, 0.4, 0.5, 0.6, 0.7, 0.8, 0.9, 1.0, 1.1, 1.2, 1.3, 1.4, 1.5, 1.6, 1.7, 1.8, 1.9, 2.0, 2.1, 2.2, 2.3, 2.4, 2.5, 2.6, 2.7, 2.8, 2.9, 3.0, 3.1, 3.2, 3.3, 3.4, 3.5, 3.6, 3.7, 3.8, 3.9, 4.0, 4.1, 4.2, 4.3, 4.4, 4.5, 4.6, 4.7, 4.8, 4.9, 5.0, 5.1, 5.2, 5.3, 5.4, 5.5, 5.6, 5.7, 5.8, 5.9, 6.0, 6.1, 6.2, 6.3, 6.4, 6.5, 6.6, 6.7, 6.8, 6.9, 7.0, 7.1, 7.2, 7.3, 7.4, 7.5, 7.6, 7.7, 7.8, 7.9, 8.0, 8.1, 8.2, 8.3, 8.4, 8.5, 8.6, 8.7, 8.8, 8.9, 9.0, 9.1, 9.2, 9.3, 9.4, 9.5, 9.6, 9.7, 9.8, 9.9, 10.0, 10.1, 10.2, 10.3, 10.4, 10.5, 10.6, 10.7, 10.8, 10.9, 11.0, 11.1, 11.2, 11.3, 11.4, 11.5, 11.6, 11.7, 11.8, 11.9, 12.0, 12.1, 12.2, 12.3, 12.4, 12.5, 12.6, 12.7, 12.8, 12.9, 13.0, 13.1, 13.2, 13.3, 13.4, 13.5, 13.6, 13.7, 13.8, 13.9, 14.0, 14.1, 14.2, 14.3, 14.4, 14.5, 14.6, 14.7, 14.8, 14.9, 15.0, 15.1, 15.2, 15.3, 15.4, 15.5, 15.6, 15.7, 15.8, 15.9, 16.0, 16.1, 16.2, 16.3, 16.4, 16.5, 16.6, 16.7, 16.8, 16.9, 17.0, 17.1, 17.2, 17.3, 17.4, 17.5, 17.6, 17.7, 17.8, 17.9, 18.0, 18.1, 18.2, 18.3, 18.4, 18.5, 18.6, 18.7, 18.8, 18.9, 19.0, 19.1, 19.2, 19.3, 19.4, 19.5, 19.6, 19.7, 19.8, 19.9, 20.0, 20.1, 20.2, 20.3, 20.4, 20.5, 20.6, 20.7, 20.8, 20.9, 21.0, 21.1, 21.2, 21.3, 21.4, 21.5, 21.6, 21.7, 21.8, 21.9, 22.0, 22.1, 22.2, 22.3, 22.4, 22.5, 22.6, 22.7, 22.8, 22.9, 23.0, 23.1, 23.2, 23.3, 23.4, 23.5, 23.6, 23.7, 23.8, 23.9, 24.0, 24.1, 24.2, 24.3, 24.4, 24.5, 24.6, 24.7, 24.8, 24.9, or 25.0 mL/hour. In some embodiments, delivery may comprise a rate of prolonged infusion of about 10, 20 30, 40, or 50 mL/hr. In one embodiment, delivery of AAV particles to cells of the central nervous system (e.g., parenchyma) comprises a rate of prolonged infusion of 1.0 mL/hour. In one embodiment, delivery consists of a rate of prolonged infusion of 1.0 mL/hour. In one embodiment, delivery of AAV to cells of the central nervous system (e.g., parenchyma) comprises a rate of prolonged infusion of 1.5 mL/hour. In one embodiment, delivery of AAV particles to cells of the central nervous system (e.g., parenchyma) consists of a rate of prolonged infusion of 1.5 mL/hour.

[0513] In one embodiment, delivery of AAV particles to cells of the central nervous system (e.g., parenchyma) may comprise a constant rate of prolonged infusion. As used herein, a “constant rate” is a rate that stays about the same during the prolonged infusion.

[0514] In one embodiment, delivery of AAV particles to cells of the central nervous system (e.g., parenchyma) may comprise a ramped rate of prolonged infusion where the rate either increases or decreases over time. As a non-limiting example, the rate of prolonged infusion increases over time. As another non-limiting example, the rate of prolonged infusion decreases over time.

[0515] In one embodiment, delivery of AAV particles to cells of the central nervous system (e.g., parenchyma) may comprise a complex rate of prolonged infusion wherein the rate of prolonged infusion alternates between high and low rates of prolonged infusion over time.

### CSF Adsorption and Intercranial Pressure

[0516] In one embodiment, delivery of AAV particles to cells of the central nervous system (e.g., parenchyma) may comprise a rate of prolonged infusion wherein the rate of prolonged infusion exceeds the rate of CSF absorption. In some embodiments, CSF pressure may increase wherein the rate of delivery is greater than the rate of clearance. In one embodiment, increased CSF pressure may increase delivery of AAV particles to cells of the central nervous system (e.g., parenchyma of brain and spinal cord). In one embodiment, delivery of AAV to cells of the central nervous system (e.g., parenchyma) may comprise an increase in sustained CSF pressure between about 1% and about 25%. In some embodiments, delivery may comprise an increase in sustained CSF pressure of about 1%, 2%, 3%, 4%, 5%, 6%, 7%, 8%, 9%, 10%, 11%, 12%, 13%, 14%, 15%, 16%, 17%, 18%, 19%, 20%, 21%, 22%, 23%, 24%, or 25%.

[0517] In one embodiment, the intracranial pressure may be evaluated and adjusted (e.g., increased or decreased) prior to administration. The route, volume, AAV particle concentration, infusion duration and/or vector titer may be optimized based on the intracranial pressure of a subject.

### Combinations

[0518] The AAV particles may be used in combination with one or more other therapeutic, prophylactic, diagnostic, or imaging agents. By “in combination with,” it is not intended to imply that the agents must be administered at the same time and/or formulated for delivery together, although these methods of delivery are within the scope of the present disclosure. Compositions can be administered concurrently with, prior to, or subsequent to, one or more other desired therapeutics or medical procedures. In general, each agent will be administered at a dose and/or on a time schedule determined for that agent. In some embodiments, the present disclosure encompasses the delivery of pharmaceutical, prophylactic, diagnostic, or imaging compositions in combination with agents that may improve their bioavailability, reduce and/or modify their metabolism, inhibit their excretion, and/or modify their distribution within the body.

### Measurement of Expression

[0519] In one embodiment, the expression of the viral genomes, and/or payloads from the viral genomes described herein may be determined using various methods known in the art such as, but not limited to, immunochemistry (e.g., IHC), in situ hybridization (ISH), laser capture, qRT-PCR, ELISA, western blot, LCMS, Vg levels, Vg ISH, IHC/IF, or any combination thereof.

[0520] Expression of payloads from viral genomes may be determined using various methods known in the art such as, but not limited to immunochemistry (e.g., IHC) or in situ hybridization (ISH). In one embodiment, transgenes delivered in different AAV capsids may have different expression levels in Dorsal Root Ganglion (DRG). As a non-limiting example, the expression of FXN in DRG may be greatest in AAVDJ8 and lowest in AAV2 (AAVDJ8>AAVDJ>AAV6>scAAVrh10>ssAAVrh10>AAV9>AAV5>AAV2).

### Methods of the Present Invention

[0521] The present disclosure provides a method for treating a disease, disorder and/or condition in a mammalian subject, including a human subject, comprising administering to the subject any of the viral particles e.g., AAV, AAV particles or AAV genomes described herein (i.e., viral genomes or “VG”) or administering to the subject a particle comprising said AAV particle or AAV genome, or administering to the subject any of the described compositions, including pharmaceutical compositions. In one embodiment, the disease, disorder and/or condition is a neurological disease, disorder and/or condition. The CNS diseases may be diseases that affect any component of the brain (including the cerebral hemispheres, diencephalon, brain stem, and cerebellum) or the spinal cord.

[0522] In some embodiments, AAV particles of the present invention, through delivery of a function payload that is a therapeutic product that can modulate the level or function of a gene product in the CNS, may be used to treat a neurodegenerative diseases and/or diseases or disorders that are characteristic with neurodegeneration, neuromuscular diseases, lysosomal diseases, trauma, bone marrow injuries, pain (including neuropathic pain), cancers of the nervous system, demyelinating diseases, autoimmune diseases of the nervous system, neurotoxic syndromes, sleeping disorders genetic brain disorders and developmental CNS disorders. A functional payload may alleviate or reduce symptoms that result from abnormal level and/or function of a gene product (e.g., an absence or defect in a protein) in a subject in need thereof or that otherwise confers a benefit to a CNS disorder in a subject in need thereof.

[0523] As non-limiting examples, therapeutic products delivered by AAV particles of the present invention may include, but are not limited to, growth and trophic factors, cytokines, hormones, neurotransmitters, enzymes, anti-apoptotic factors, angiogenic factors, and any protein known to be mutated in pathological disorders such as the “survival of motor neuron” protein (SMN); antisense RNA or RNAi targeting messenger RNAs coding for proteins having a therapeutic interest in any of CNS diseases discussed herein; or microRNAs that function in gene silencing and post-transcriptionally regulation of gene expression in the CNS (e.g., brain specific Mir-128a, See Adlakha and Saini, Molecular cancer, 2014, 13:33).

[0524] The growth and trophic factors may include, but are not limited to brain-derived growth factor (BDNF), epidermal growth factor (EGF), basic Fibroblast growth factor (bFGF), Ciliary neurotrophic factor (CNTF), corticotropin-releasing factor (CRF), Glial cell line derived growth factor (GDNF), Insulin-like growth factor-1 (IGF-1), nerve growth factor (NGF), neurotrophin-3 (NT-3), neurotrophin-4 (NT-4), and vascular endothelial growth factor (VEGF). Cytokines may include interleukin-10 (IL-10), interleukin-6, Interleukin-8, chemokine CXCL12 (SDF-1), TGF-beta, and Growth and differentiation factor (GDF-1/10).

[0525] In some embodiments, the neurological disorders may be neurodegenerative disorders including, but not limited to, Alzheimer's Diseases (AD), Amyotrophic lateral sclerosis (ALS), Creutzfeldt-Jakob Disease, Huntingtin's disease (HD), Friedreich's ataxia (FA), Parkinson Disease (PD), Multiple System Atrophy (MSA), Spinal Muscular Atrophy (SMA), Multiple Sclerosis (MS), Primary progressive aphasia, Progressive supranuclear palsy, Dementia, Brain Cancer, Degenerative Nerve Diseases, Encephalitis, Epilepsy, Genetic Brain Disorders that cause neurodegeneration, Retinitis pigmentosa (RP), Head and Brain Malformations, Hydrocephalus, Stroke, Prion disease, Infantile neuronal ceroid lipofuscinosis (INCL) (a neurodegenerative disease of children caused by a deficiency in the lysosomal enzyme palmitoyl protein thioesterase-1 (PPT1)).

[0526] In some embodiments, AAV particles of the present invention may be used to treat diseases that are associated with impairments of the growth and development of the CNS, i.e., neurodevelopmental disorders. In some aspects, such neurodevelopmental disorders may be caused by genetic mutations, including but not limited to, Fragile X syndrome (caused by mutations in FMR1 gene), Down syndrome (caused by trisomy of chromosome 21), Rett syndrome, Williams syndrome, Angelman syndrome, Smith-Magenis syndrome, ATR-X syndrome, Barth syndrome, Immune dysfunction and/or infectious diseases during infancy such as Sydenham's chorea, Schizophrenia Congenital toxoplasmosis, Congenital rubella syndrome, Metabolic disorders such as diabetes mellitus and phenylketonuria; nutritional defects and/or brain trauma, Autism and autism spectrum.

[0527] In some embodiments, AAV particles of the present invention, may be used to treat a tumor in the CNS, including but not limited to, acoustic neuroma, Astrocytoma (Grades I, II, III and IV), Chordoma, CNS Lymphoma, Craniopharyngioma, Gliomas (e.g., brain stem glioma, ependymoma, optical nerve glioma, subependymoma), Medulloblastoma, Meningioma, Metastatic brain tumors, Oligodendroglioma, Pituitary Tumors, Primitive neuroectodermal (PNET), and Schwannoma.

[0528] In some embodiments, the neurological disorders may be functional neurological disorders with motor and/or sensory symptoms which have neurological origin in the CNS. As non-limiting examples, functional neurological disorders may be chronic pain, seizures, speech problems, involuntary movements, and sleep disturbances.

[0529] In some embodiments, the neurological disorders may be white matter disorders (a group of diseases that affects nerve fibers in the CNS) including but not limited to, Pelizaeus-Merzbacher disease, Hypomyelination with atrophy of basal ganglia and cerebellum, Aicardi-Goutières syndrome, Megalencephalic leukoencephalopathy with subcortical cysts, Congenital muscular dystrophies, Myotonic dystrophy, Wilson disease, Lowe syndrome, Sjögren-Larsson syndrome, PIBD or Tay syndrome, Cockayne's disease, erebrotendinous xanthomatosis, Zellweger syndrome, Neonatal adrenoleukodystrophy, Infantile Refsum disease, Zellweger-like syndrome, Pseudo-Zellweger syndrome, Pseudo-neonatal adrenoleukodystrophy, Bifunctional protein deficiency, X-linked adrenoleukodystrophy and adrenomyeloneuropathy and Refsum disease.

[0530] In some embodiments, the neurological disorders may be lysosomal storage disorders (LSDs) caused by the inability of cells in the CNS to break down metabolic end products, including but not limited to Niemann-Pick disease (a LSD resulting from inherited deficiency in acid sphingomyelinase (ASM); Metachromatic leukodystrophy (MLD) (a LSD characterized by accumulation of sulfatides in glial cells and neurons, the result of an inherited deficiency of arylsulfatase A (ARSA)); Globoid-cell leukodystrophy (GLD) (a LSD caused by mutations in galactosylceramidase); Fabry disease (a LSD caused by mutations in the alpha-galactosidase A (GLA) gene); Gaucher disease (caused by mutations in the beta-glucocerebrosidase (GBA) gene); GM1/GM2 gangliosidosis; Mucopolysaccharidoses disorder; Pompe disease; and Neuronal ceroid lipofuscinosis.

[0531] In one embodiment, the neurological disease, disorder and/or condition is Parkinson's disease. In one embodiment the polynucleotide used to treat Parkinson's disease comprises any one of SEQ ID NOs 570-662 wherein the payload is replaced by AADC or any other payload known in the art for treating Parkinson's disease. As a non-limiting example, the payload may be a sequence such as NM_001082971.1 (GI: 132814447), NM_000790.3 (GI: 132814459), NM_001242886.1 (GI: 338968913), NM_001242887.1 (GI: 338968916), NM_001242888.1 (GI: 338968918), NM_001242889.1 (GI: 338968920), NM_001242890.1 (GI: 338968922) and fragment or variants thereof.

[0532] In another embodiment, the neurological disease, disorder and/or condition is Friedreich's Ataxia. In one embodiment, the delivery of the AAV particles may halt or slow the disease progression of Friedreich's Ataxia by 10%, 20%, 30%, 40%, 50%, 60%, 70%, 80%, 90%, 95% or more than 95% using a known analysis method and comparator group for Friedreich's Ataxia. As a non-limiting example, the delivery of the AAV particles may halt or slow progression of Friedreich's Ataxia progression as measured by mFARS/SARA by 50% relative to a comparator group. In one embodiment the polynucleotide used to treat Friedreich's Ataxia comprises any one of SEQ ID NOs 570-662 wherein the payload is replaced by Frataxin or any other payload known in the art for treating Friedreich's Ataxia. As a non-limiting example, the payload may be a sequence such as NM_000144.4 (GI: 239787167), NM_181425.2 (GI: 239787185), NM_001161706.1 (GI: 239787197) and fragment or variants thereof.

[0533] In another embodiment, the neurological disease, disorder and/or condition is Amyotrophic lateral sclerosis (ALS). In one embodiment, the delivery of the AAV particles may halt or slow the disease progression of ALS by 10%, 20%, 30%, 40%, 50%, 60%, 70%, 80%, 90%, 95% or more than 95% using a known analysis method and comparator group for ALS. In one embodiment the polynucleotide used to treat ALS comprises any one of SEQ ID NOs 570-662 wherein the payload is replaced by an shRNA, miRNA, siRNA, RNAi for SOD1 or any other payload known in the art for treating ALS.

[0534] In another embodiment, the neurological disease, disorder and/or condition is Huntington's disease. In one embodiment, the delivery of the AAV particles may halt or slow the disease progression of Huntington's disease by 10%, 20%, 30%, 40%, 50%, 60%, 70%, 80%, 90%, 95% or more than 95% using a known analysis method and comparator group for Huntington's disease. In one embodiment the polynucleotide used to treat Huntington's disease comprises any one of SEQ ID NOs 570-662 wherein the payload is replaced by an shRNA, miRNA, siRNA, RNAi for Htt or any other payload known in the art for treating Huntington's disease.

[0535] In another embodiment, the neurological disease, disorder or condition is spinal muscular atrophy (SMA). In one embodiment, the delivery of the AAV particles may halt or slow the disease progression of SMA by 10%, 20%, 30%, 40%, 50%, 60%, 70%, 80%, 90%, 95% or more than 95% using a known analysis method and comparator group for SMA. In one embodiment the polynucleotide used to treat SMA comprises any one of SEQ ID NOs 570-662 wherein the payload is replaced by SMN or any other payload known in the art for treating SMA. As a non-limiting example, the payload may be a sequence such as NM_001297715.1 (GI: 663070993), NM_000344.3 (GI: 196115055), NM_022874.2 (GI: 196115040) and fragment or variants thereof.

[0536] In one embodiment, the AAV particle encoding a payload may increase the amount of protein encoded by the payload (e.g., transgene) by 1%, 2%, 3%, 4%, 5%, 6%, 7%, 8%, 9%, 10%, 11%, 12%, 13%, 14%, 15%, 16%, 17%, 18%, 19%, 20%, 25%, 30%, 35%, 40%, 45%, 50%, 55%, 60%, 65%, 70%, 75%, 80%, 85%, 90%, 95%, 97%, 99% or more than 100%.

[0537] In one embodiment, the AAV particle encoding a payload may increase the amount of protein encoded by the payload (e.g., transgene) by 1-5%, 1-10%, 1-15%, 1-20%, 5-10%, 5-15%, 5-20%, 5-25%, 10-20%, 10-30%, 15-35%, 20-40%, 20-50%, 30-50%, 30-60%, 40-60%, 40-70%, 50-60%, 50-70%, 60-80%, 60-90%, 70-80%, 70-90%, 80-90%, 80-99% or 90-100%.

[0538] In one embodiment, the AAV particles may be delivered to a subject to improve and/or correct mitochondrial dysfunction.

[0539] In one embodiment, the AAV particles may be delivered to a subject to preserve neurons. The neurons may be primary and/or secondary sensor neurons.

[0540] In one embodiment, administration of the AAV particles may preserve and/or correct function in the sensory pathways.

[0541] In one embodiment, administration of the AAV particles may protect central pathways from degeneration. As a non-limiting example, the degeneration is later onset degeneration of auditory pathways.

### Definitions

[0542] At various places in the present specification, substituents of compounds of the present disclosure are disclosed in groups or in ranges. It is specifically intended that the present disclosure include each and every individual sub-combination of the members of such groups and ranges. The following is a non-limiting list of term definitions.

[0543] Adeno-associated virus: The term “adeno-associated virus” or “AAV” as used herein refers to members of the dependovirus genus comprising any particle, sequence, gene, protein, or component derived therefrom. The term “AAV particle” as used herein comprises a capsid and a polynucleotide referred to as the AAV genome or viral genome (VG). The AAV particle may be derived from any serotype, described herein or known in the art, including combinations of serotypes (i.e., “pseudotyped” AAV) or from various genomes (e.g., single stranded or self-complementary). In addition, the AAV particle may be replication defective and/or targeted.

[0544] Activity: As used herein, the term “activity” refers to the condition in which things are happening or being done. Compositions of the invention may have activity and this activity may involve one or more biological events.

[0545] Administered in combination: As used herein, the term “administered in combination” or “combined administration” refers to simultaneous exposure to two or more agents (e.g., AAV) administered at the same time or within an interval such that the subject is at some point in time simultaneously exposed to both and/or such that there may be an overlap in the effect of each agent on the patient. In some embodiments, at least one dose of one or more agents is administered within about 24 hours, 12 hours, 6 hours, 3 hours, 1 hour, 30 minutes, 15 minutes, 10 minutes, 5 minutes, or 1 minute of at least one dose of one or more other agents. In some embodiments, administration occurs in overlapping dosage regimens. As used herein, the term “dosage regimen” refers to a plurality of doses spaced apart in time. Such doses may occur at regular intervals or may include one or more hiatus in administration. In some embodiments, the administration of individual doses of one or more compounds and/or compositions of the present invention, as described herein, are spaced sufficiently closely together such that a combinatorial (e.g., a synergistic) effect is achieved.

[0546] Amelioration: As used herein, the term “amelioration” or “ameliorating” refers to a lessening of severity of at least one indicator of a condition or disease. For example, in the context of neurodegeneration disorder, amelioration includes the reduction of neuron loss.

[0547] Animal: As used herein, the term “animal” refers to any member of the animal kingdom. In some embodiments, “animal” refers to humans at any stage of development. In some embodiments, “animal” refers to non-human animals at any stage of development. In certain embodiments, the non-human animal is a mammal (e.g., a rodent, a mouse, a rat, a rabbit, a monkey, a dog, a cat, a sheep, cattle, a primate, or a pig). In some embodiments, animals include, but are not limited to, mammals, birds, reptiles, amphibians, fish, and worms. In some embodiments, the animal is a transgenic animal, genetically-engineered animal, or a clone.

[0548] Antisense strand: As used herein, the term “the antisense strand” or “the first strand” or “the guide strand” of a siRNA molecule refers to a strand that is substantially complementary to a section of about 10-50 nucleotides, e.g., about 15-30, 16-25, 18-23 or 19-22 nucleotides of the mRNA of the gene targeted for silencing. The antisense strand or first strand has sequence sufficiently complementary to the desired target mRNA sequence to direct target-specific silencing, e.g., complementarity sufficient to trigger the destruction of the desired target mRNA by the RNAi machinery or process.

[0549] Approximately: As used herein, the term “approximately” or “about,” as applied to one or more values of interest, refers to a value that is similar to a stated reference value. In certain embodiments, the term “approximately” or “about” refers to a range of values that fall within 25%, 20%, 19%, 18%, 17%, 16%, 15%, 14%, 13%, 12%, 11%, 10%, 9%, 8%, 7%, 6%, 5%, 4%, 3%, 2%, 1%, or less in either direction (greater than or less than) of the stated reference value unless otherwise stated or otherwise evident from the context (except where such number would exceed 100% of a possible value).

[0550] Associated with: As used herein, the terms “associated with,” “conjugated,” “linked,” “attached,” and “tethered,” when used with respect to two or more moieties, mean that the moieties are physically associated or connected with one another, either directly or via one or more additional moieties that serve as linking agents, to form a structure that is sufficiently stable so that the moieties remain physically associated under the conditions in which the structure is used, e.g., physiological conditions. An “association” need not be strictly through direct covalent chemical bonding. It may also suggest ionic or hydrogen bonding or a hybridization based connectivity sufficiently stable such that the “associated” entities remain physically associated.

[0551] Biomolecule: As used herein, the term “biomolecule” is any natural molecule which is amino acid-based, nucleic acid-based, carbohydrate-based or lipid-based, and the like.

[0552] Biologically active: As used herein, the phrase “biologically active” refers to a characteristic of any substance (e.g., an AAV) that has activity in or on a biological system and/or organism. For instance, a substance that, when administered to an organism, has a biological effect on that organism, is considered to be biologically active. In particular embodiments, a compounds and/or compositions of the present invention may be considered biologically active if even a portion of is biologically active or mimics an activity considered to biologically relevant.

[0553] Biological system: As used herein, the term “biological system” refers to a group of organs, tissues, cells, intracellular components, proteins, nucleic acids, molecules (including, but not limited to biomolecules) that function together to perform a certain biological task within cellular membranes, cellular compartments, cells, tissues, organs, organ systems, multicellular organisms, or any biological entity. In some embodiments, biological systems are cell signaling pathways comprising intracellular and/or extracellular cell signaling biomolecules. In some embodiments, biological systems comprise growth factor signaling events within the extracellular/cellular matrix and/or cellular niches.

[0554] Central Nervous System or CNS: As used herein, “Central Nervous System” or “CNS” refers to one of the two major subdivisions of the nervous system, which in vertebrates includes of the brain and spinal cord. The central nervous system coordinates the activity of the entire nervous system.

[0555] CNS tissue: As used herein, “CNS tissue” or “CNS tissues” refers to the tissues of the central nervous system, which in vertebrates, include the brain and spinal cord and sub-structures thereof.

[0556] CNS structures: As used herein, “CNS structures” refers to structures of the central nervous system and sub-structures thereof. Non-limiting examples of structures in the spinal cord may include, ventral horn, dorsal horn, white matter, and nervous system pathways or nuclei within. Non limiting examples of structures in the brain include, forebrain, midbrain, hindbrain, diencephalon, telencephalon, myelencepphalon, metencephalon, mesencephalon, prosencephalon, rhombencephalon, cortices, frontal lobe, parietal lobe, temporal lobe, occipital lobe, cerebrum, thalamus, hypothalamus, tectum, tegmentum, cerebellum, pons, medulla, amygdala, hippocampus, basal ganglia, corpus callosum, pituitary gland, ventricles and sub-structures thereof.

[0557] CNS Cells: As used herein, “CNS Cells” refers to cells of the central nervous system and sub-structures thereof. Non-limiting examples of CNS cells include, neurons and sub-types thereof, glia, microglia, oligodendrocytes, ependymal cells and astrocytes. Non-limiting examples of neurons include sensory neurons, motor neurons, interneurons, unipolar cells, bipolar cells, multipolar cells, psuedounipolar cells, pyramidal cells, basket cells, stellate cells, purkinje cells, betz cells, amacrine cells, granule cell, ovoid cell, medium aspiny neurons and large aspiny neurons.

[0558] Complementary and substantially complementary: As used herein, the term “complementary” refers to the ability of polynucleotides to form base pairs with one another. Base pairs are typically formed by hydrogen bonds between nucleotide units in antiparallel polynucleotide strands. Complementary polynucleotide strands can form base pair in the Watson-Crick manner (e.g., A to T, A to U, C to G), or in any other manner that allows for the formation of duplexes. As persons skilled in the art are aware, when using RNA as opposed to DNA, uracil rather than thymine is the base that is considered to be complementary to adenosine. However, when a U is denoted in the context of the present invention, the ability to substitute a T is implied, unless otherwise stated. Perfect complementarity or 100% complementarity refers to the situation in which each nucleotide unit of one polynucleotide strand can form hydrogen bond with a nucleotide unit of a second polynucleotide strand. Less than perfect complementarity refers to the situation in which some, but not all, nucleotide units of two strands can form hydrogen bond with each other. For example, for two 20-mers, if only two base pairs on each strand can form hydrogen bond with each other, the polynucleotide strands exhibit 10% complementarity. In the same example, if 18 base pairs on each strand can form hydrogen bonds with each other, the polynucleotide strands exhibit 90% complementarity. As used herein, the term “substantially complementary” means that the siRNA has a sequence (e.g., in the antisense strand) which is sufficient to bind the desired target mRNA, and to trigger the RNA silencing of the target mRNA.

[0559] Composition: As used herein, the term “composition” comprises a polynucleotide, viral genome or AAV particle and at least one excipient.

[0560] Compound: As used herein, the term “compound,” refers to a distinct chemical entity. In some embodiments, a particular compound may exist in one or more isomeric or isotopic forms (including, but not limited to stereoisomers, geometric isomers and isotopes). In some embodiments, a compound is provided or utilized in only a single such form. In some embodiments, a compound is provided or utilized as a mixture of two or more such forms (including, but not limited to a racemic mixture of stereoisomers). Those of skill in the art appreciate that some compounds exist in different such forms, show different properties and/or activities (including, but not limited to biological activities). In such cases it is within the ordinary skill of those in the art to select or avoid particular forms of the compound for use in accordance with the present invention. For example, compounds that contain asymmetrically substituted carbon atoms can be isolated in optically active or racemic forms. Methods on how to prepare optically active forms from optically active starting materials are known in the art, such as by resolution of racemic mixtures or by stereoselective synthesis.

[0561] Conserved: As used herein, the term “conserved” refers to nucleotides or amino acid residues of polynucleotide or polypeptide sequences, respectively, that are those that occur unaltered in the same position of two or more sequences being compared. Nucleotides or amino acids that are relatively conserved are those that are conserved among more related sequences than nucleotides or amino acids appearing elsewhere in the sequences.

[0562] In some embodiments, two or more sequences are said to be “completely conserved” if they are 100% identical to one another. In some embodiments, two or more sequences are said to be “highly conserved” if they are at least 70% identical, at least 80% identical, at least 90% identical, or at least 95% identical to one another. In some embodiments, two or more sequences are said to be “highly conserved” if they are about 70% identical, about 80% identical, about 90% identical, about 95%, about 98%, or about 99% identical to one another. In some embodiments, two or more sequences are said to be “conserved” if they are at least 30% identical, at least 40% identical, at least 50% identical, at least 60% identical, at least 70% identical, at least 80% identical, at least 90% identical, or at least 95% identical to one another. In some embodiments, two or more sequences are said to be “conserved” if they are about 30% identical, about 40% identical, about 50% identical, about 60% identical, about 70% identical, about 80% identical, about 90% identical, about 95% identical, about 98% identical, or about 99% identical to one another. Conservation of sequence may apply to the entire length of an oligonucleotide or polypeptide or may apply to a portion, region or feature thereof.

[0563] In one embodiment, conserved sequences are not contiguous. Those skilled in the art are able to appreciate how to achieve alignment when gaps in contiguous alignment are present between sequences, and to align corresponding residues not withstanding insertions or deletions present.

[0564] Delivery: As used herein, “delivery” refers to the act or manner of delivering a parvovirus e.g., AAV compound, substance, entity, moiety, cargo or payload to a target. Such target may be a cell, tissue, organ, organism, or system (whether biological or production).

[0565] Delivery Agent: As used herein, “delivery agent” refers to any agent which facilitates, at least in part, the delivery of one or more substances (including, but not limited to a compounds and/or compositions of the present invention, e.g., viral particles or AAV particles) to targeted cells.

[0566] Destabilized: As used herein, the term “destable,” “destabilize,” or “destabilizing region” means a region or molecule that is less stable than a starting, reference, wild-type or native form of the same region or molecule.

[0567] Detectable label: As used herein, “detectable label” refers to one or more markers, signals, or moieties which are attached, incorporated or associated with another entity, which markers, signals or moieties are readily detected by methods known in the art including radiography, fluorescence, chemiluminescence, enzymatic activity, absorbance, immunological detection and the like. Detectable labels may include radioisotopes, fluorophores, chromophores, enzymes, dyes, metal ions, ligands, biotin, avidin, streptavidin and haptens, quantum dots, polyhistidine tags, myc tags, flag tags, human influenza hemagglutinin (HA) tags and the like. Detectable labels may be located at any position in the entity with which they are attached, incorporated or associated. For example, when attached, incorporated in or associated with a peptide or protein, they may be within the amino acids, the peptides, or proteins, or located at the N- or C-termini.

[0568] Effective amount: As used herein, the term “effective amount” of an agent is that amount sufficient to effect beneficial or desired results, for example, upon single or multiple dose administration to a subject or a cell, in curing, alleviating, relieving or improving one or more symptoms of a disorder and, as such, an “effective amount” depends upon the context in which it is being applied. For example, in the context of administering an agent that treats ALS, an effective amount of an agent is, for example, an amount sufficient to achieve treatment, as defined herein, of ALS, as compared to the response obtained without administration of the agent.

[0569] Engineered: As used herein, embodiments of the invention are “engineered” when they are designed to have a feature or property, whether structural or chemical, that varies from a starting point, wild-type or native molecule. Thus, engineered agents or entities are those whose design and/or production include an act of the hand of man.

[0570] Epitope: As used herein, an “epitope” refers to a surface or region on a molecule that is capable of interacting with a biomolecule. For example a protein may contain one or more amino acids, e.g., an epitope, which interacts with an antibody, e.g., a biomolecule. In some embodiments, when referring to a protein or protein module, an epitope may comprise a linear stretch of amino acids or a three dimensional structure formed by folded amino acid chains.

[0571] Expression: As used herein, “expression” of a nucleic acid sequence refers to one or more of the following events: (1) production of an RNA template from a DNA sequence (e.g., by transcription); (2) processing of an RNA transcript (e.g., by splicing, editing, 5′ cap formation, and/or 3′ end processing); (3) translation of an RNA into a polypeptide or protein; (4) folding of a polypeptide or protein; and (5) post-translational modification of a polypeptide or protein.

[0572] Feature: As used herein, a “feature” refers to a characteristic, a property, or a distinctive element.

[0573] Formulation: As used herein, a “formulation” includes at least a compound and/or composition of the present invention (e.g., a vector, AAV particle, etc.) and a delivery agent.

[0574] Fowler's Position: As used herein, a subject tin the “Fowler's position” is sitting straight up or leaning slightly back with legs which may be straight or bent. A “high fowlers” position is somewhat who is sitting upright. A “low fowlers” position is someone whose head is only slightly elevated.

[0575] Fragment: A “fragment,” as used herein, refers to a contiguous portion of a whole. For example, fragments of proteins may comprise polypeptides obtained by digesting full-length protein isolated from cultured cells. In some embodiments, a fragment of a protein includes at least 3, 4, 5, 6, 7, 8, 9, 10, 11, 12, 13, 14, 15, 16, 17, 18, 19, 20, 25, 30, 35, 40, 45, 50, 55, 60, 65, 70, 75, 80, 85, 90, 95, 100, 150, 200, 250 or more amino acids.

[0576] Functional: As used herein, a “functional” biological molecule is a biological entity with a structure and in a form in which it exhibits a property and/or activity by which it is characterized.

[0577] Gene expression: The term “gene expression” refers to the process by which a nucleic acid sequence undergoes successful transcription and in most instances translation to produce a protein or peptide. For clarity, when reference is made to measurement of “gene expression”, this should be understood to mean that measurements may be of the nucleic acid product of transcription, e.g., RNA or mRNA or of the amino acid product of translation, e.g., polypeptides or peptides. Methods of measuring the amount or levels of RNA, mRNA, polypeptides and peptides are well known in the art.

[0578] High Cervical Region: As used herein, the term “high cervical region” refers to the region of the spinal cord comprising the cervical vertebrae C1, C2, C3 and C4 or any subset thereof.

[0579] Homology: As used herein, the term “homology” refers to the overall relatedness between polymeric molecules, e.g. between nucleic acid molecules (e.g. DNA molecules and/or RNA molecules) and/or between polypeptide molecules. In some embodiments, polymeric molecules are considered to be “homologous” to one another if their sequences are at least 25%, 30%, 35%, 40%, 45%, 50%, 55%, 60%, 65%, 70%, 75%, 80%, 85%, 90%, 95%, or 99% identical or similar. The term “homologous” necessarily refers to a comparison between at least two sequences (polynucleotide or polypeptide sequences). In accordance with the invention, two polynucleotide sequences are considered to be homologous if the polypeptides they encode are at least about 50%, 60%, 70%, 80%, 90%, 95%, or even 99% for at least one stretch of at least about 20 amino acids. In some embodiments, homologous polynucleotide sequences are characterized by the ability to encode a stretch of at least 4-5 uniquely specified amino acids. For polynucleotide sequences less than 60 nucleotides in length, homology is typically determined by the ability to encode a stretch of at least 4-5 uniquely specified amino acids. In accordance with the invention, two protein sequences are considered to be homologous if the proteins are at least about 50%, 60%, 70%, 80%, or 90% identical for at least one stretch of at least about 20 amino acids. In many embodiments, homologous protein may show a large overall degree of homology and a high degree of homology over at least one short stretch of at least 3, 4, 5, 6, 7, 8, 9, 10, 11, 12, 13, 14, 15, 16, 17, 18, 19, 20, 25, 30, 35, 40, 45, 50 or more amino acids. In many embodiments, homologous proteins share one or more characteristic sequence elements. As used herein, the term “characteristic sequence element” refers to a motif present in related proteins. In some embodiments, the presence of such motifs correlates with a particular activity (such as biological activity).

[0580] Identity: As used herein, the term “identity” refers to the overall relatedness between polymeric molecules, e.g., between oligonucleotide molecules (e.g. DNA molecules and/or RNA molecules) and/or between polypeptide molecules. Calculation of the percent identity of two polynucleotide sequences, for example, may be performed by aligning the two sequences for optimal comparison purposes (e.g., gaps can be introduced in one or both of a first and a second nucleic acid sequences for optimal alignment and non-identical sequences can be disregarded for comparison purposes). In certain embodiments, the length of a sequence aligned for comparison purposes is at least 30%, at least 40%, at least 50%, at least 60%, at least 70%, at least 80%, at least 90%, at least 95%, or 100% of the length of the reference sequence. The nucleotides at corresponding nucleotide positions are then compared. When a position in the first sequence is occupied by the same nucleotide as the corresponding position in the second sequence, then the molecules are identical at that position. The percent identity between the two sequences is a function of the number of identical positions shared by the sequences, taking into account the number of gaps, and the length of each gap, which needs to be introduced for optimal alignment of the two sequences. The comparison of sequences and determination of percent identity between two sequences can be accomplished using a mathematical algorithm. For example, the percent identity between two nucleotide sequences can be determined using methods such as those described in Computational Molecular Biology, Lesk, A. M., ed., Oxford University Press, New York, 1988; Biocomputing: Informatics and Genome Projects, Smith, D. W., ed., Academic Press, New York, 1993; Sequence Analysis in Molecular Biology, von Heinje, G., Academic Press, 1987; Computer Analysis of Sequence Data, Part I, Griffin, A. M., and Griffin, H. G., eds., Humana Press, New Jersey, 1994; and Sequence Analysis Primer, Gribskov, M. and Devereux, J., eds., M Stockton Press, New York, 1991; each of which is incorporated herein by reference in its entirety. For example, the percent identity between two nucleotide sequences can be determined, for example using the algorithm of Meyers and Miller (CABIOS, 1989, 4:11-17), which has been incorporated into the ALIGN program (version 2.0) using a PAM120 weight residue table, a gap length penalty of 12 and a gap penalty of 4. The percent identity between two nucleotide sequences can, alternatively, be determined using the GAP program in the GCG software package using an NWSgapdna.CMP matrix. Methods commonly employed to determine percent identity between sequences include, but are not limited to those disclosed in Carillo, H., and Lipman, D., SIAM J Applied Math., 48:1073 (1988); incorporated herein by reference in its entirety. Techniques for determining identity are codified in publicly available computer programs. Computer software to determine homology between two sequences include, but are not limited to, GCG program package, Devereux, J., et al., Nucleic Acids Research, 12(1), 387 (1984)), BLASTP, BLASTN, and FASTA Altschul, S. F. et al., J. Molec. Biol., 215, 403 (1990)).

[0581] Inhibit expression of a gene: As used herein, the phrase “inhibit expression of a gene” means to cause a reduction in the amount of an expression product of the gene. The expression product may be RNA transcribed from the gene (e.g. mRNA) or a polypeptide translated from mRNA transcribed from the gene. Typically a reduction in the level of mRNA results in a reduction in the level of a polypeptide translated therefrom. The level of expression may be determined using standard techniques for measuring mRNA or protein.

[0582] In vitro: As used herein, the term “in vitro” refers to events that occur in an artificial environment, e.g., in a test tube or reaction vessel, in cell culture, in a Petri dish, etc., rather than within an organism (e.g., animal, plant, or microbe).

[0583] In vivo: As used herein, the term “in vivo” refers to events that occur within an organism (e.g., animal, plant, or microbe or cell or tissue thereof).

[0584] Isolated: As used herein, the term “isolated” is synonymous with “separated”, but carries with it the inference separation was carried out by the hand of man. In one embodiment, an isolated substance or entity is one that has been separated from at least some of the components with which it was previously associated (whether in nature or in an experimental setting). Isolated substances may have varying levels of purity in reference to the substances from which they have been associated. Isolated substances and/or entities may be separated from at least about 10%, about 20%, about 30%, about 40%, about 50%, about 60%, about 70%, about 80%, about 90%, or more of the other components with which they were initially associated. In some embodiments, isolated agents are more than about 80%, about 85%, about 90%, about 91%, about 92%, about 93%, about 94%, about 95%, about 96%, about 97%, about 98%, about 99%, or more than about 99% pure. As used herein, a substance is “pure” if it is substantially free of other components.

[0585] Substantially isolated: By “substantially isolated” is meant that the compound is substantially separated from the environment in which it was formed or detected. Partial separation can include, for example, a composition enriched in the compound of the present disclosure. Substantial separation can include compositions containing at least about 50%, at least about 60%, at least about 70%, at least about 80%, at least about 90%, at least about 95%, at least about 97%, or at least about 99% by weight of the compound of the present disclosure, or salt thereof. Methods for isolating compounds and their salts are routine in the art. In some embodiments, isolation of a substance or entity includes disruption of chemical associations and/or bonds. In some embodiments, isolation includes only the separation from components with which the isolated substance or entity was previously combined and does not include such disruption.

[0586] Left Lateral Recumbent Position: As used herein, “Left Lateral Recumbent” or LLR position refers to a subject laying on their left side.

[0587] Lumbar Region: As used herein, the term “lumbar region” refers to the region of the spinal cord comprising the lumbar vertebrae L1, L2, L3, L4, and L5.

[0588] Modified: As used herein, the term “modified” refers to a changed state or structure of a molecule or entity as compared with a parent or reference molecule or entity. Molecules may be modified in many ways including chemically, structurally, and functionally. In some embodiments, compounds and/or compositions of the present invention are modified by the introduction of non-natural amino acids, or non-natural nucleotides.

[0589] Mutation: As used herein, the term “mutation” refers to a change and/or alteration. In some embodiments, mutations may be changes and/or alterations to proteins (including peptides and polypeptides) and/or nucleic acids (including polynucleic acids). In some embodiments, mutations comprise changes and/or alterations to a protein and/or nucleic acid sequence. Such changes and/or alterations may comprise the addition, substitution and or deletion of one or more amino acids (in the case of proteins and/or peptides) and/or nucleotides (in the case of nucleic acids and or polynucleic acids). In embodiments wherein mutations comprise the addition and/or substitution of amino acids and/or nucleotides, such additions and/or substitutions may comprise 1 or more amino acid and/or nucleotide residues and may include modified amino acids and/or nucleotides.

[0590] Naturally occurring: As used herein, “naturally occurring” or “wild-type” means existing in nature without artificial aid, or involvement of the hand of man.

[0591] Non-human vertebrate: As used herein, a “non-human vertebrate” includes all vertebrates except Homo sapiens, including wild and domesticated species. Examples of non-human vertebrates include, but are not limited to, mammals, such as alpaca, banteng, bison, camel, cat, cattle, deer, dog, donkey, gayal, goat, guinea pig, horse, llama, mule, pig, rabbit, reindeer, sheep water buffalo, and yak.

[0592] Nucleic acid: As used herein, the term “nucleic acid”, “polynucleotide” and ‘oligonucleotide” refer to any nucleic acid polymers composed of either polydeoxyribonucleotides (containing 2-deoxy-D-ribose), or polyribonucleotides (containing D-ribose), or any other type of polynucleotide which is an N glycoside of a purine or pyrimidine base, or modified purine or pyrimidine bases. There is no intended distinction in length between the term “nucleic acid”, “polynucleotide” and “oligonucleotide”, and these terms will be used interchangeably. These terms refer only to the primary structure of the molecule. Thus, these terms include double- and single-stranded DNA, as well as double- and single stranded RNA.

[0593] Off-target: As used herein, “off target” refers to any unintended effect on any one or more target, gene and/or cellular transcript.

[0594] Operably linked: As used herein, the phrase “operably linked” refers to a functional connection between two or more molecules, constructs, transcripts, entities, moieties or the like.

[0595] Particle: As used herein, a “particle” is a virus comprised of at least two components, a protein capsid and a polynucleotide sequence enclosed within the capsid.

[0596] Patient: As used herein, “patient” refers to a subject who may seek or be in need of treatment, requires treatment, is receiving treatment, will receive treatment, or a subject who is under care by a trained (e.g., licensed) professional for a particular disease or condition.

[0597] Payload: As used herein, “payload” refers to one or more polynucleotides or polynucleotide regions encoded by or within a viral genome or an expression product of such polynucleotide or polynucleotide region, e.g., a transgene, a polynucleotide encoding a polypeptide or multi-polypeptide or a modulatory nucleic acid or regulatory nucleic acid.

[0598] Payload construct: As used herein, “payload construct” is one or more polynucleotide regions encoding or comprising a payload that is flanked on one or both sides by an inverted terminal repeat (ITR) sequence. The payload construct is a template that is replicated in a viral production cell to produce a viral genome.

[0599] Payload construct vector: As used herein, “payload construct vector” is a vector encoding or comprising a payload construct, and regulatory regions for replication and expression in bacterial cells. The payload construct vector may also comprise component for viral expression in a viral replication cell.

[0600] Peptide: As used herein, the term “peptide” refers to a chain of amino acids that is less than or equal to about 50 amino acids long, e.g., about 5, 10, 15, 20, 25, 30, 35, 40, 45, or 50 amino acids long.

[0601] Pharmaceutically acceptable: The phrase “pharmaceutically acceptable” is employed herein to refer to those compounds, materials, compositions, and/or dosage forms which are, within the scope of sound medical judgment, suitable for use in contact with the tissues of human beings and animals without excessive toxicity, irritation, allergic response, or other problem or complication, commensurate with a reasonable benefit/risk ratio.

[0602] Pharmaceutically acceptable excipients: As used herein, the term “pharmaceutically acceptable excipient,” as used herein, refers to any ingredient other than active agents (e.g., as described herein) present in pharmaceutical compositions and having the properties of being substantially nontoxic and non-inflammatory in subjects. In some embodiments, pharmaceutically acceptable excipients are vehicles capable of suspending and/or dissolving active agents. Excipients may include, for example: antiadherents, antioxidants, binders, coatings, compression aids, disintegrants, dyes (colors), emollients, emulsifiers, fillers (diluents), film formers or coatings, flavors, fragrances, glidants (flow enhancers), lubricants, preservatives, printing inks, sorbents, suspending or dispersing agents, sweeteners, and waters of hydration. Excipients include, but are not limited to: butylated hydroxytoluene (BHT), calcium carbonate, calcium phosphate (dibasic), calcium stearate, croscarmellose, cross-linked polyvinyl pyrrolidone, citric acid, crospovidone, cysteine, ethylcellulose, gelatin, hydroxypropyl cellulose, hydroxypropyl methylcellulose, lactose, magnesium stearate, maltitol, mannitol, methionine, methylcellulose, methyl paraben, microcrystalline cellulose, polyethylene glycol, polyvinyl pyrrolidone, povidone, pregelatinized starch, propyl paraben, retinyl palmitate, shellac, silicon dioxide, sodium carboxymethyl cellulose, sodium citrate, sodium starch glycolate, sorbitol, starch (corn), stearic acid, sucrose, talc, titanium dioxide, vitamin A, vitamin E, vitamin C, and xylitol.

[0603] Pharmaceutically acceptable salts: Pharmaceutically acceptable salts of the compounds described herein are forms of the disclosed compounds wherein the acid or base moiety is in its salt form (e.g., as generated by reacting a free base group with a suitable organic acid). Examples of pharmaceutically acceptable salts include, but are not limited to, mineral or organic acid salts of basic residues such as amines; alkali or organic salts of acidic residues such as carboxylic acids; and the like. Representative acid addition salts include acetate, adipate, alginate, ascorbate, aspartate, benzenesulfonate, benzoate, bisulfate, borate, butyrate, camphorate, camphorsulfonate, citrate, cyclopentanepropionate, digluconate, dodecylsulfate, ethanesulfonate, fumarate, glucoheptonate, glycerophosphate, hemisulfate, heptonate, hexanoate, hydrobromide, hydrochloride, hydroiodide, 2-hydroxy-ethanesulfonate, lactobionate, lactate, laurate, lauryl sulfate, malate, maleate, malonate, methanesulfonate, 2-naphthalenesulfonate, nicotinate, nitrate, oleate, oxalate, palmitate, pamoate, pectinate, persulfate, 3-phenylpropionate, phosphate, picrate, pivalate, propionate, stearate, succinate, sulfate, tartrate, thiocyanate, toluenesulfonate, undecanoate, valerate salts, and the like. Representative alkali or alkaline earth metal salts include sodium, lithium, potassium, calcium, magnesium, and the like, as well as nontoxic ammonium, quaternary ammonium, and amine cations, including, but not limited to ammonium, tetramethylammonium, tetraethylammonium, methylamine, dimethylamine, trimethylamine, triethylamine, ethylamine, and the like. Pharmaceutically acceptable salts include the conventional non-toxic salts, for example, from non-toxic inorganic or organic acids. In some embodiments a pharmaceutically acceptable salt is prepared from a parent compound which contains a basic or acidic moiety by conventional chemical methods. Generally, such salts can be prepared by reacting the free acid or base forms of these compounds with a stoichiometric amount of the appropriate base or acid in water or in an organic solvent, or in a mixture of the two; generally, nonaqueous media like ether, ethyl acetate, ethanol, isopropanol, or acetonitrile are preferred. Lists of suitable salts are found in Remington's Pharmaceutical Sciences, 17^{th} ed., Mack Publishing Company, Easton, Pa., 1985, p. 1418, Pharmaceutical Salts: Properties, Selection, and Use, P. H. Stahl and C. G. Wermuth (eds.), Wiley-VCH, 2008, and Berge et al., Journal of Pharmaceutical Science, 66, 1-19 (1977), each of which is incorporated herein by reference in its entirety. Pharmaceutically acceptable solvate: The term “pharmaceutically acceptable solvate,” as used herein, refers to a crystalline form of a compound wherein molecules of a suitable solvent are incorporated in the crystal lattice. For example, solvates may be prepared by crystallization, recrystallization, or precipitation from a solution that includes organic solvents, water, or a mixture thereof. Examples of suitable solvents are ethanol, water (for example, mono-, di-, and tri-hydrates), N-methylpyrrolidinone (NMP), dimethyl sulfoxide (DMSO), N,N′-dimethylformamide (DMF), N,N′-dimethylacetamide (DMAC), 1,3-dimethyl-2-imidazolidinone (DMEU), 1,3-dimethyl-3,4,5,6-tetrahydro-2-(1H)-pyrimidinone (DMPU), acetonitrile (ACN), propylene glycol, ethyl acetate, benzyl alcohol, 2-pyrrolidone, benzyl benzoate, and the like. When water is the solvent, the solvate is referred to as a “hydrate.” In some embodiments, the solvent incorporated into a solvate is of a type or at a level that is physiologically tolerable to an organism to which the solvate is administered (e.g., in a unit dosage form of a pharmaceutical composition).

[0604] Pharmaceutical Composition: As used herein, the term “pharmaceutical composition” or pharmaceutically acceptable composition” comprises an AAV polynucleotides, AAV genomes or AAV particle and one or more pharmaceutically acceptable excipients.

[0605] Pharmacokinetic: As used herein, “pharmacokinetic” refers to any one or more properties of a molecule or compound as it relates to the determination of the fate of substances administered to living organisms. Pharmacokinetics are divided into several areas including the extent and rate of absorption, distribution, metabolism and excretion. This is commonly referred to as ADME where: (A) Absorption is the process of a substance entering the blood circulation; (D) Distribution is the dispersion or dissemination of substances throughout the fluids and tissues of the body; (M) Metabolism (or Biotransformation) is the irreversible transformation of parent compounds into daughter metabolites; and (E) Excretion (or Elimination) refers to the elimination of the substances from the body. In rare cases, some drugs irreversibly accumulate in body tissue.

[0606] Physicochemical: As used herein, “physicochemical” means of or relating to a physical and/or chemical property.

[0607] Preventing: As used herein, the term “preventing” refers to partially or completely delaying onset of an infection, disease, disorder and/or condition; partially or completely delaying onset of one or more symptoms, features, or clinical manifestations of a particular infection, disease, disorder, and/or condition; partially or completely delaying onset of one or more symptoms, features, or manifestations of a particular infection, disease, disorder, and/or condition; partially or completely delaying progression from an infection, a particular disease, disorder and/or condition; and/or decreasing the risk of developing pathology associated with the infection, the disease, disorder, and/or condition.

[0608] Proliferate: As used herein, the term “proliferate” means to grow, expand, replicate or increase or cause to grow, expand, replicate or increase. “Proliferative” means having the ability to proliferate. “Anti-proliferative” means having properties counter to or in opposition to proliferative properties.

[0609] Prone position: As used herein, “prone position” refers to a subject lying face down.

[0610] Protein of interest: As used herein, the terms “proteins of interest” or “desired proteins” include those provided herein and fragments, mutants, variants, and alterations thereof.

[0611] Purified: As used herein, the term “purify” means to make substantially pure or clear from unwanted components, material defilement, admixture or imperfection. “Purified” refers to the state of being pure. “Purification” refers to the process of making pure.

[0612] Region: As used herein, the term “region” refers to a zone or general area. In some embodiments, when referring to a protein or protein module, a region may comprise a linear sequence of amino acids along the protein or protein module or may comprise a three dimensional area, an epitope and/or a cluster of epitopes. In some embodiments, regions comprise terminal regions. As used herein, the term “terminal region” refers to regions located at the ends or termini of a given agent. When referring to proteins, terminal regions may comprise N- and/or C-termini. N-termini refer to the end of a protein comprising an amino acid with a free amino group. C-termini refer to the end of a protein comprising an amino acid with a free carboxyl group. N- and/or C-terminal regions may there for comprise the N- and/or C-termini as well as surrounding amino acids. In some embodiments, N- and/or C-terminal regions comprise from about 3 amino acid to about 30 amino acids, from about 5 amino acids to about 40 amino acids, from about 10 amino acids to about 50 amino acids, from about 20 amino acids to about 100 amino acids and/or at least 100 amino acids. In some embodiments, N-terminal regions may comprise any length of amino acids that includes the N-terminus, but does not include the C-terminus. In some embodiments, C-terminal regions may comprise any length of amino acids, which include the C-terminus, but do not comprise the N-terminus.

[0613] In some embodiments, when referring to a polynucleotide, a region may comprise a linear sequence of nucleic acids along the polynucleotide or may comprise a three dimensional area, secondary structure, or tertiary structure. In some embodiments, regions comprise terminal regions. As used herein, the term “terminal region” refers to regions located at the ends or termini of a given agent. When referring to polynucleotides, terminal regions may comprise 5′ and 3′ termini. 5′ termini refer to the end of a polynucleotide comprising a nucleic acid with a free phosphate group. 3′ termini refer to the end of a polynucleotide comprising a nucleic acid with a free hydroxyl group. 5′ and 3′ regions may there for comprise the 5′ and 3′ termini as well as surrounding nucleic acids. In some embodiments, 5′ and 3′ terminal regions comprise from about 9 nucleic acids to about 90 nucleic acids, from about 15 nucleic acids to about 120 nucleic acids, from about 30 nucleic acids to about 150 nucleic acids, from about 60 nucleic acids to about 300 nucleic acids and/or at least 300 nucleic acids. In some embodiments, 5′ regions may comprise any length of nucleic acids that includes the 5′ terminus, but does not include the 3′ terminus. In some embodiments, 3′ regions may comprise any length of nucleic acids, which include the 3′ terminus, but does not comprise the 5′ terminus.

[0614] Right Lateral Recumbent Position: As used herein, “Right Lateral Recumbent” or RLR position refers to a subject laying on their right side.

[0615] RNA or RNA molecule: As used herein, the term “RNA” or “RNA molecule” or “ribonucleic acid molecule” refers to a polymer of ribonucleotides; the term “DNA” or “DNA molecule” or “deoxyribonucleic acid molecule” refers to a polymer of deoxyribonucleotides. DNA and RNA can be synthesized naturally, e.g., by DNA replication and transcription of DNA, respectively; or be chemically synthesized. DNA and RNA can be single-stranded (i.e., ssRNA or ssDNA, respectively) or multi-stranded (e.g., double stranded, i.e., dsRNA and dsDNA, respectively). The term “mRNA” or “messenger RNA”, as used herein, refers to a single stranded RNA that encodes the amino acid sequence of one or more polypeptide chains.

[0616] RNA interference: As used herein, the term “RNA interference” or “RNAi” refers to a sequence specific regulatory mechanism mediated by RNA molecules which results in the inhibition or interference or “silencing” of the expression of a corresponding protein-coding gene.

[0617] Sacral Region: As used herein, the term “sacral region” refers to the region of the spinal cord comprising the sacral vertebrae S1, S2, S3, S4, and S5.

[0618] Sample: As used herein, the term “sample” refers to an aliquot or portion taken from a source and/or provided for analysis or processing. In some embodiments, a sample is from a biological source such as a tissue, cell or component part (e.g. a body fluid, including but not limited to blood, mucus, lymphatic fluid, synovial fluid, cerebrospinal fluid, saliva, amniotic fluid, amniotic cord blood, urine, vaginal fluid and semen). In some embodiments, a sample may be or comprise a homogenate, lysate or extract prepared from a whole organism or a subset of its tissues, cells or component parts, or a fraction or portion thereof, including but not limited to, for example, plasma, serum, spinal fluid, lymph fluid, the external sections of the skin, respiratory, intestinal, and genitourinary tracts, tears, saliva, milk, blood cells, tumors, organs. In some embodiments, a sample is or comprises a medium, such as a nutrient broth or gel, which may contain cellular components, such as proteins or nucleic acid molecule. In some embodiments, a “primary” sample is an aliquot of the source. In some embodiments, a primary sample is subjected to one or more processing (e.g., separation, purification, etc.) steps to prepare a sample for analysis or other use.

[0619] Self-complementary viral particle: As used herein, a “self-complementary viral particle” is a particle comprised of at least two components, a protein capsid and a polynucleotide sequence encoding a self-complementary genome enclosed within the capsid.

[0620] Sense strand: As used herein, the term “the sense strand” or “the second strand” or “the passenger strand” of a siRNA molecule refers to a strand that is complementary to the antisense strand or first strand. The antisense and sense strands of a siRNA molecule are hybridized to form a duplex structure. As used herein, a “siRNA duplex” includes a siRNA strand having sufficient complementarity to a section of about 10-50 nucleotides of the mRNA of the gene targeted for silencing and a siRNA strand having sufficient complementarity to form a duplex with the siRNA strand.

[0621] Signal Sequences: As used herein, the phrase “signal sequences” refers to a sequence which can direct the transport or localization.

[0622] Single unit dose: As used herein, a “single unit dose” is a dose of any therapeutic administered in one dose/at one time/single route/single point of contact, i.e., single administration event. In some embodiments, a single unit dose is provided as a discrete dosage form (e.g., a tablet, capsule, patch, loaded syringe, vial, etc.).

[0623] Similarity: As used herein, the term “similarity” refers to the overall relatedness between polymeric molecules, e.g. between polynucleotide molecules (e.g. DNA molecules and/or RNA molecules) and/or between polypeptide molecules. Calculation of percent similarity of polymeric molecules to one another can be performed in the same manner as a calculation of percent identity, except that calculation of percent similarity takes into account conservative substitutions as is understood in the art.

[0624] Small/short interfering RNA: As used herein, the term “small/short interfering RNA” or “siRNA” refers to an RNA molecule (or RNA analog) comprising between about 5-60 nucleotides (or nucleotide analogs) which is capable of directing or mediating RNAi. Preferably, a siRNA molecule comprises between about 15-30 nucleotides or nucleotide analogs, more preferably between about 16-25 nucleotides (or nucleotide analogs), even more preferably between about 18-23 nucleotides (or nucleotide analogs), and even more preferably between about 19-22 nucleotides (or nucleotide analogs) (e.g., 19, 20, 21 or 22 nucleotides or nucleotide analogs). The term “short” siRNA refers to a siRNA comprising 5-23 nucleotides, preferably 21 nucleotides (or nucleotide analogs), for example, 19, 20, 21 or 22 nucleotides. The term “long” siRNA refers to a siRNA comprising 24-60 nucleotides, preferably about 24-25 nucleotides, for example, 23, 24, 25 or 26 nucleotides. Short siRNAs may, in some instances, include fewer than 19 nucleotides, e.g., 16, 17 or 18 nucleotides, or as few as 5 nucleotides, provided that the shorter siRNA retains the ability to mediate RNAi. Likewise, long siRNAs may, in some instances, include more than 26 nucleotides, e.g., 27, 28, 29, 30, 35, 40, 45, 50, 55, or even 60 nucleotides, provided that the longer siRNA retains the ability to mediate RNAi or translational repression absent further processing, e.g., enzymatic processing, to a short siRNA. siRNAs can be single stranded RNA molecules (ss-siRNAs) or double stranded RNA molecules (ds-siRNAs) comprising a sense strand and an antisense strand which hybridized to form a duplex structure called siRNA duplex.

[0625] Split dose: As used herein, a “split dose” is the division of single unit dose or total daily dose into two or more doses.

[0626] Stable: As used herein “stable” refers to a compound or entity that is sufficiently robust to survive isolation to a useful degree of purity from a reaction mixture, and preferably capable of formulation into an efficacious therapeutic agent.

[0627] Stabilized: As used herein, the term “stabilize”, “stabilized,” “stabilized region” means to make or become stable. In some embodiments, stability is measured relative to an absolute value. In some embodiments, stability is measured relative to a reference compound or entity.

[0628] Subject: As used herein, the term “subject” or “patient” refers to any organism to which a composition in accordance with the invention may be administered, e.g., for experimental, diagnostic, prophylactic, and/or therapeutic purposes. Typical subjects include animals (e.g., mammals such as mice, rats, rabbits, non-human primates, and humans).

[0629] Substantially: As used herein, the term “substantially” refers to the qualitative condition of exhibiting total or near-total extent or degree of a characteristic or property of interest. One of ordinary skill in the biological arts will understand that biological and chemical phenomena rarely, if ever, go to completion and/or proceed to completeness or achieve or avoid an absolute result. The term “substantially” is therefore used herein to capture the potential lack of completeness inherent in many biological and chemical phenomena.

[0630] Substantially equal: As used herein as it relates to time differences between doses, the term means plus/minus 2%.

[0631] Substantially simultaneously: As used herein and as it relates to plurality of doses, the term typically means within about 2 seconds.

[0632] Suffering from: An individual who is “suffering from” a disease, disorder, and/or condition has been diagnosed with or displays one or more symptoms of a disease, disorder, and/or condition.

[0633] Supine position: As used herein, “supine position” refers to a subject lying on his or her back.

[0634] Susceptible to: An individual who is “susceptible to” a disease, disorder, and/or condition has not been diagnosed with and/or may not exhibit symptoms of the disease, disorder, and/or condition but harbors a propensity to develop a disease or its symptoms. In some embodiments, an individual who is susceptible to a disease, disorder, and/or condition (for example, cancer) may be characterized by one or more of the following: (1) a genetic mutation associated with development of the disease, disorder, and/or condition; (2) a genetic polymorphism associated with development of the disease, disorder, and/or condition; (3) increased and/or decreased expression and/or activity of a protein and/or nucleic acid associated with the disease, disorder, and/or condition; (4) habits and/or lifestyles associated with development of the disease, disorder, and/or condition; (5) a family history of the disease, disorder, and/or condition; and (6) exposure to and/or infection with a microbe associated with development of the disease, disorder, and/or condition. In some embodiments, an individual who is susceptible to a disease, disorder, and/or condition will develop the disease, disorder, and/or condition. In some embodiments, an individual who is susceptible to a disease, disorder, and/or condition will not develop the disease, disorder, and/or condition.

[0635] Synthetic: The term “synthetic” means produced, prepared, and/or manufactured by the hand of man. Synthesis of polynucleotides or polypeptides or other molecules of the present invention may be chemical or enzymatic.

[0636] Targeting: As used herein, “targeting” means the process of design and selection of nucleic acid sequence that will hybridize to a target nucleic acid and induce a desired effect.

[0637] Targeted Cells: As used herein, “targeted cells” refers to any one or more cells of interest. The cells may be found in vitro, in vivo, in situ or in the tissue or organ of an organism. The organism may be an animal, preferably a mammal, more preferably a human and most preferably a patient.

[0638] Therapeutic Agent: The term “therapeutic agent” refers to any agent that, when administered to a subject has a therapeutic, diagnostic, and/or prophylactic effect and/or elicits a desired biological and/or pharmacological effect.

[0639] Therapeutically effective amount: As used herein, the term “therapeutically effective amount” means an amount of an agent to be delivered (e.g., nucleic acid, drug, therapeutic agent, diagnostic agent, prophylactic agent, etc.) that is sufficient, when administered to a subject suffering from or susceptible to an infection, disease, disorder, and/or condition, to treat, improve symptoms of, diagnose, prevent, and/or delay the onset of the infection, disease, disorder, and/or condition. In some embodiments, a therapeutically effective amount is provided in a single dose. In some embodiments, a therapeutically effective amount is administered in a dosage regimen comprising a plurality of doses. Those skilled in the art will appreciate that in some embodiments, a unit dosage form may be considered to comprise a therapeutically effective amount of a particular agent or entity if it comprises an amount that is effective when administered as part of such a dosage regimen.

[0640] Therapeutically effective outcome: As used herein, the term “therapeutically effective outcome” means an outcome that is sufficient in a subject suffering from or susceptible to an infection, disease, disorder, and/or condition, to treat, improve symptoms of, diagnose, prevent, and/or delay the onset of the infection, disease, disorder, and/or condition.

[0641] Thoracic Region: As used herein, a “thoracic region” refers to a region of the spinal cord comprising the thoracic vertebrae T1, T2, T3, T4, T5, T6, T7, T8, T9, T10, T11, and T12.

[0642] Total daily dose: As used herein, a “total daily dose” is an amount given or prescribed in a 24 hour period. It may be administered as a single unit dose.

[0643] Treating: As used herein, the term “treating” refers to partially or completely alleviating, ameliorating, improving, relieving, delaying onset of, inhibiting progression of, reducing severity of, and/or reducing incidence of one or more symptoms or features of a particular infection, disease, disorder, and/or condition. For example, “treating” cancer may refer to inhibiting survival, growth, and/or spread of a tumor. Treatment may be administered to a subject who does not exhibit signs of a disease, disorder, and/or condition and/or to a subject who exhibits only early signs of a disease, disorder, and/or condition for the purpose of decreasing the risk of developing pathology associated with the disease, disorder, and/or condition.

[0644] Trendelenburg Position: As used herein, a subject tin the “Trendelenburg position” is lying supine with their head slightly lower than their feet.

[0645] Unmodified: As used herein, “unmodified” refers to any substance, compound or molecule prior to being changed in any way. Unmodified may, but does not always, refer to the wild-type or native form of a biomolecule or entity. Molecules or entities may undergo a series of modifications whereby each modified product may serve as the “unmodified” starting molecule or entity for a subsequent modification.

[0646] Vector: As used herein, a “vector” is any molecule or moiety which transports, transduces or otherwise acts as a carrier of a heterologous molecule. Vectors of the present invention may be produced recombinantly and may be based on and/or may comprise adeno-associated virus (AAV) parent or reference sequence. Such parent or reference AAV sequences may serve as an original, second, third or subsequent sequence for engineering vectors. In non-limiting examples, such parent or reference AAV sequences may comprise any one or more of the following sequences: a polynucleotide sequence encoding a polypeptide or multi-polypeptide, which sequence may be wild-type or modified from wild-type and which sequence may encode full-length or partial sequence of a protein, protein domain, or one or more subunits of a protein; a polynucleotide comprising a modulatory or regulatory nucleic acid which sequence may be wild-type or modified from wild-type; and a transgene that may or may not be modified from wild-type sequence. These AAV sequences may serve as either the “donor” sequence of one or more codons (at the nucleic acid level) or amino acids (at the polypeptide level) or “acceptor” sequences of one or more codons (at the nucleic acid level) or amino acids (at the polypeptide level).

[0647] Viral construct vector: As used herein, a “viral construct vector” is a vector which comprises one or more polynucleotide regions encoding or comprising Rep and or Cap protein. A viral construct vector may also comprise one or more polynucleotide region encoding or comprising components for viral expression in a viral replication cell.

[0648] Viral genome: As used herein, a “viral genome” is a polynucleotide encoding at least one inverted terminal repeat (ITR), at least one regulatory sequence, and at least one payload. The viral genome is derived by replication of a payload construct from the payload construct vector. A viral genome encodes at least one copy of the payload construct.

### EQUIVALENTS AND SCOPE

[0649] Those skilled in the art will recognize, or be able to ascertain using no more than routine experimentation, many equivalents to the specific embodiments in accordance with the invention described herein. The scope of the present invention is not intended to be limited to the above Description, but rather is as set forth in the appended claims.

[0650] In the claims, articles such as “a,” “an,” and “the” may mean one or more than one unless indicated to the contrary or otherwise evident from the context. claims or descriptions that include “or” between one or more members of a group are considered satisfied if one, more than one, or all of the group members are present in, employed in, or otherwise relevant to a given product or process unless indicated to the contrary or otherwise evident from the context. The invention includes embodiments in which exactly one member of the group is present in, employed in, or otherwise relevant to a given product or process. The invention includes embodiments in which more than one, or the entire group members are present in, employed in, or otherwise relevant to a given product or process.

[0651] It is also noted that the term “comprising” is intended to be open and permits but does not require the inclusion of additional elements or steps. When the term “comprising” is used herein, the term “consisting of” is thus also encompassed and disclosed.

[0652] Where ranges are given, endpoints are included. Furthermore, it is to be understood that unless otherwise indicated or otherwise evident from the context and understanding of one of ordinary skill in the art, values that are expressed as ranges can assume any specific value or subrange within the stated ranges in different embodiments of the invention, to the tenth of the unit of the lower limit of the range, unless the context clearly dictates otherwise.

[0653] In addition, it is to be understood that any particular embodiment of the present invention that falls within the prior art may be explicitly excluded from any one or more of the claims. Since such embodiments are deemed to be known to one of ordinary skill in the art, they may be excluded even if the exclusion is not set forth explicitly herein. Any particular embodiment of the compositions of the invention (e.g., any antibiotic, therapeutic or active ingredient; any method of production; any method of use; etc.) can be excluded from any one or more claims, for any reason, whether or not related to the existence of prior art.

[0654] It is to be understood that the words which have been used are words of description rather than limitation, and that changes may be made within the purview of the appended claims without departing from the true scope and spirit of the invention in its broader aspects.

[0655] While the present invention has been described at some length and with some particularity with respect to the several described embodiments, it is not intended that it should be limited to any such particulars or embodiments or any particular embodiment, but it is to be construed with references to the appended claims so as to provide the broadest possible interpretation of such claims in view of the prior art and, therefore, to effectively encompass the intended scope of the invention.

### EXAMPLES

### Example 1. Design of the Payload Construct

[0656] Payload constructs were designed to comprise at a minimum a nucleic acid sequence encoding a frataxin protein.

[0657] Once designed, the sequence was engineered or synthesized or inserted in a plasmid or vector and administered to a cell or organism. Suitable plasmids or vectors were any which transduce or transfect the target cell.

[0658] Adeno-associated viral vectors (AAV), viral particles or entire viruses may be used.

[0659] Administration resulted in the processing of the payload construct to generate the frataxin protein which alters the etiology of the disease, in this case Friedreich's Ataxia.

[0660] AAV constructs were designed and built using standard molecular cloning techniques. FXN-tag transgenes were cloned into either pAAVss, pAAVsc, or pcDNA3.1 plasmid and the resulting clones were further sequenced to confirm the correctness of all elements such as ITRs, promoters, and tags.

[0661] In one non-limiting example, plasmids containing a payload construct are described herein and some are described in Table 4. These AAV particles in Table 4 may comprise a pCDNA3.1, pAAVss, or pAAVsc vectors and may contain the following components: a CMV, CB6, CB7, PGK, GFAP, hSYN, mCMVe-hEF1p, SV40, CBA or FXN promoter; an intron such as SV40 or MVM/CBA; a full or partial Kozak sequence; a FXN (Frataxin), CS (citrate synthase), RPL (ribosomal protein), SOD2 (superoxide dismutase), or AH (aconitate hydratase) signal peptide, also known as a mitochondrial targeting sequence (MTS); a cmyc, flag, cmycflag3, 3flag, 3flagcmyc, HA long or HA short tag; a SV40, rabbit beta-globin, or bGH poly (A) signal, 3′ and/or 5′ ITR sequences derived from any AAV genome comprising a partial and/or wild type sequence; and either wild type Frataxin or codon optimized Frataxin.

TABLE 4
AAV constructs.

| | | | | 0.5 | Signal | | | | | | SEQ ID |
|---|---|---|---|---|---|---|---|---|---|---|---|
| Vector | Promoter | Intron | Kozak | Kozak | Peptide | Payload | Tag | 5′ITR | Poly(A) | 3′ITR | NO |
| pCDNA3.1(+) | CMV | N/A | − | − | FXN | FXN | cmyc3flag | − | bGH | − | 570 |
| pCDNA3.1(+) | CMV | N/A | − | − | FXN | FXN | — | − | bGH | − | 571 |
| pCDNA3.1(+) | CMV | N/A | − | − | FXN | FXN | 3flag | − | bGH | − | 572 |
| pCDNA3.1(+) | CMV | N/A | − | − | FXN | FXN | 3flagcmyc | − | bGH | − | 573 |
| pCDNA3.1(+) | CMV | N/A | − | − | FXN | FXN | cmyc | − | bGH | − | 574 |
| pCDNA3.1(+) | CMV | N/A | − | − | FXN | FXN | HA(L) | − | bGH | − | 575 |
| pCDNA3.1(+) | CMV | N/A | − | − | FXN | FXN | HA(S) | − | bGH | − | 576 |
| pCDNA3.1(+) | CMV | N/A | + | − | CS | FXN | — | − | bGH | − | 577 |
| pCDNA3.1(+) | CMV | N/A | − | + | FXN | FXN | — | − | bGH | − | 578 |
| pAAVss | CB6 | N/A | − | + | FXN | FXN | — | + | SV40 | + | 579 |
| pAAVss | CB6 | MVM/CBA | − | + | FXN | FXN | — | + | SV40 | + | 580 |
| pAAVss | CB6 | SV40 | − | − | FXN | FXN | — | + | SV40 | + | 581 |
| pAAVss | CB6 | SV40 | − | − | FXN | CodOp | — | + | SV40 | + | 582 |
| | | | | | | FXN | | | | | |
| pAAVss | CB6 | SV40 | − | − | FXN | CodOp | — | + | SV40 | + | 583 |
| | | | | | | FXN | | | | | |
| pAAVss | CB6 | SV40 | − | − | FXN | CodOp | — | + | SV40 | + | 584 |
| | | | | | | FXN | | | | | |
| pAAVss | CB6 | SV40 | − | − | FXN | CodOp | — | + | SV40 | + | 585 |
| | | | | | | FXN | | | | | |
| pAAVss | CB6 | SV40 | − | − | FXN | CodOp | — | + | SV40 | + | 586 |
| | | | | | | FXN | | | | | |
| pAAVss | CB6 | SV40 | − | − | FXN | CodOp | — | + | SV40 | + | 587 |
| | | | | | | FXN | | | | | |
| pAAVss | CB6 | SV40 | − | − | FXN | CodOp | — | + | SV40 | + | 588 |
| | | | | | | FXN | | | | | |
| pAAVss | CB6 | SV40 | − | − | FXN | CodOp | — | + | SV40 | + | 589 |
| | | | | | | FXN | | | | | |
| pAAVss | CB6 | SV40 | − | − | FXN | CodOp | — | + | SV40 | + | 590 |
| | | | | | | FXN | | | | | |
| pAAVss | CB6 | SV40 | − | − | FXN | CodOp | — | + | SV40 | + | 591 |
| | | | | | | FXN | | | | | |
| pAAVss | CB6 | SV40 | − | − | FXN | CodOp | — | + | SV40 | + | 592 |
| | | | | | | FXN | | | | | |
| pAAVss | CB6 | SV40 | − | − | FXN | CodOp | — | + | SV40 | + | 593 |
| | | | | | | FXN | | | | | |
| pAAVss | CB6 | SV40 | + | − | AH | FXN | — | + | SV40 | + | 594 |
| pAAVss | CB6 | SV40 | + | − | CS | FXN | — | + | SV40 | + | 595 |
| pAAVss | CB6 | SV40 | + | − | CS | FXN | HA(L) | + | SV40 | + | 596 |
| pAAVss | CB6 | SV40 | + | − | CS | FXN | HA(S) | + | SV40 | + | 597 |
| pAAVss | CB6 | SV40 | − | + | FXN | FXN | — | + | SV40 | + | 598 |
| pAAVss | CB6 | SV40 | − | + | FXN | CodOp | — | + | SV40 | + | 599 |
| | | | | | | FXN | | | | | |
| pAAVss | CB6 | SV40 | − | + | FXN | CodOp | — | + | SV40 | + | 600 |
| | | | | | | FXN | | | | | |
| pAAVss | CB6 | SV40 | − | + | FXN | CodOp | — | + | SV40 | + | 601 |
| | | | | | | FXN | | | | | |
| pAAVss | CB6 | SV40 | − | + | FXN | CodOp | — | + | SV40 | + | 602 |
| | | | | | | FXN | | | | | |
| pAAVss | CB6 | SV40 | − | + | FXN | CodOp | — | + | SV40 | + | 603 |
| | | | | | | FXN | | | | | |
| pAAVss | CB6 | SV40 | − | + | FXN | CodOp | — | + | SV40 | + | 604 |
| | | | | | | FXN | | | | | |
| pAAVss | CB6 | SV40 | − | + | FXN | CodOp | — | + | SV40 | + | 605 |
| | | | | | | FXN | | | | | |
| pAAVss | CB6 | SV40 | + | − | RPL | FXN | — | + | SV40 | + | 606 |
| pAAVss | CB6 | SV40 | + | − | RPL | CodOp | — | + | SV40 | + | 607 |
| | | | | | | FXN | | | | | |
| pAAVss | CB6 | SV40 | − | + | S0D2 | CodOp | — | + | SV40 | + | 608 |
| | | | | | | FXN | | | | | |
| pAAVss | CB7 | SV40 | − | − | FXN | FXN | — | + | SV40 | + | 609 |
| pAAVss | CMV | N/A | − | + | FXN | FXN | — | + | SV40 | + | 610 |
| pAAVss | CMV | SV40 | − | − | FXN | FXN | — | + | SV40 | + | 611 |
| pAAVss | CMV | SV40 | − | − | FXN | CodOp | — | + | SV40 | + | 612 |
| | | | | | | FXN | | | | | |
| pAAVss | CMV | SV40 | − | − | FXN | CodOp | — | + | SV40 | + | 613 |
| | | | | | | FXN | | | | | |
| pAAVss | CMV | SV40 | − | − | FXN | CodOp | — | + | SV40 | + | 614 |
| | | | | | | FXN | | | | | |
| pAAVss | CMV | SV40 | − | − | FXN | CodOp | — | + | SV40 | + | 615 |
| | | | | | | FXN | | | | | |
| pAAVss | CMV | SV40 | − | + | FXN | FXN | — | + | SV40 | + | 616 |
| pAAVss | FXNp | SV40 | − | − | FXN | FXN | — | + | SV40 | + | 617 |
| pAAVss | FXNp | SV40 | − | − | FXN | CodOp | — | + | SV40 | + | 618 |
| | | | | | | FXN | | | | | |
| pAAVss | FXNp | SV40 | − | − | FXN | CodOp | — | + | SV40 | + | 619 |
| | | | | | | FXN | | | | | |
| pAAVss | FXNp | SV40 | − | − | FXN | CodOp | — | + | SV40 | + | 620 |
| | | | | | | FXN | | | | | |
| pAAVss | FXNp | SV40 | − | − | FXN | CodOp | — | + | SV40 | + | 621 |
| | | | | | | FXN | | | | | |
| pAAVss | GFAP | SV40 | − | − | FXN | FXN | — | + | SV40 | + | 622 |
| pAAVss | hSYN | SV40 | − | − | FXN | FXN | — | + | SV40 | + | 623 |
| pAAVss | mCMVe- | SV40 | − | − | FXN | FXN | — | + | SV40 | + | 624 |
| | hEF1p | | | | | | | | | | |
| pAAVss | mCMVe- | SV40 | − | − | FXN | FXN | — | + | SV40 | + | 625 |
| | hEF1p | | | | | | | | | | |
| pAAVss | PGK | SV40 | − | − | FXN | FXN | — | + | SV40 | + | 626 |
| pAAVss | PGK | SV40 | − | − | FXN | CodOp | — | + | SV40 | + | 627 |
| | | | | | | FXN | | | | | |
| pAAVss | PGK | SV40 | − | − | FXN | CodOp | — | + | SV40 | + | 628 |
| | | | | | | FXN | | | | | |
| pAAVss | PGK | SV40 | − | − | FXN | CodOp | — | + | SV40 | + | 629 |
| | | | | | | FXN | | | | | |
| pAAVss | PGK | SV40 | − | − | FXN | CodOp | — | + | SV40 | + | 630 |
| | | | | | | FXN | | | | | |
| pAAVss | SV40 | SV40 | − | − | FXN | FXN | — | + | SV40 | + | 631 |
| pAAVsc | CBA | SV40 | − | − | FXN | FXN | — | + | SV40 | + | 632 |
| pAAVsc | CBA | SV40 | − | − | FXN | FXN | HA(S) | + | SV40 | + | 633 |
| pAAVsc | CBA | SV40 | − | − | FXN | FXN | 3flag | + | SV40 | + | 634 |
| pAAVsc | CBA | SV40 | − | − | FXN | FXN | 3flagcmyc | + | SV40 | + | 635 |
| pAAVsc | CBA | SV40 | − | − | FXN | FXN | cmyc | + | SV40 | + | 636 |
| pAAVsc | CBA | SV40 | − | − | FXN | FXN | cmyc3flag | + | SV40 | + | 637 |
| pAAVsc | CBA | SV40 | − | − | FXN | CodOp | — | + | SV40 | + | 638 |
| | | | | | | FXN | | | | | |
| pAAVsc | CBA | SV40 | − | − | FXN | CodOp | — | + | SV40 | + | 639 |
| | | | | | | FXN | | | | | |
| pAAVsc | CBA | SV40 | − | − | FXN | CodOp | — | + | SV40 | + | 640 |
| | | | | | | FXN | | | | | |
| pAAVsc | CBA | SV40 | − | − | FXN | CodOp | — | + | SV40 | + | 641 |
| | | | | | | FXN | | | | | |
| pAAVsc | CMV | SV40 | − | − | FXN | FXN | — | + | SV40 | + | 642 |
| pAAVsc | CMV | SV40 | − | − | FXN | CodOp | — | + | SV40 | + | 643 |
| | | | | | | FXN | | | | | |
| pAAVsc | CMV | SV40 | − | − | FXN | CodOp | — | + | SV40 | + | 644 |
| | | | | | | FXN | | | | | |
| pAAVsc | CMV | SV40 | − | − | FXN | CodOp | — | + | SV40 | + | 645 |
| | | | | | | FXN | | | | | |
| pAAVsc | CMV | SV40 | − | − | FXN | CodOp | — | + | SV40 | + | 646 |
| | | | | | | FXN | | | | | |
| pAAVsc | CMV | SV40 | − | + | FXN | FXN | — | + | SV40 | + | 647 |
| pAAVsc | FXNp | SV40 | − | − | FXN | FXN | — | + | SV40 | + | 648 |
| pAAVsc | FXNp | SV40 | − | − | FXN | CodOp | — | + | SV40 | + | 649 |
| | | | | | | FXN | | | | | |
| pAAVsc | FXNp | SV40 | − | − | FXN | CodOp | — | + | SV40 | + | 650 |
| | | | | | | FXN | | | | | |
| pAAVsc | FXNp | SV40 | − | − | FXN | CodOp | — | + | SV40 | + | 651 |
| | | | | | | FXN | | | | | |
| pAAVsc | FXNp | SV40 | − | − | FXN | CodOp | — | + | SV40 | + | 652 |
| | | | | | | FXN | | | | | |
| pAAVsc | GFAP | SV40 | − | − | FXN | FXN | — | + | SV40 | + | 653 |
| pAAVsc | PGK | SV40 | − | − | FXN | FXN | — | + | SV40 | + | 654 |
| pAAVsc | PGK | SV40 | − | − | FXN | CodOp | — | + | SV40 | + | 655 |
| | | | | | | FXN | | | | | |
| pAAVsc | PGK | SV40 | − | − | FXN | CodOp | — | + | SV40 | + | 656 |
| | | | | | | FXN | | | | | |
| pAAVsc | PGK | SV40 | − | − | FXN | CodOp | — | + | SV40 | + | 657 |
| | | | | | | FXN | | | | | |
| pAAVsc | PGK | SV40 | − | − | FXN | CodOp | — | + | SV40 | + | 658 |
| | | | | | | FXN | | | | | |
| pAAVss | CB6 | SV40 | − | + | FXN | FXN | — | + | SV40 | + | 659 |
| pAAVsc | CBA | SV40 | − | + | FXN | FXN | — | + | SV40 | + | 660 |
| pAAVss | N/A | SV40 | − | − | FXN | FXN | — | + | SV41 | + | 661 |
| pAAVss | CBA | SV40 | − | − | FXN | FXN | — | + | SV42 | + | 662 |

[0662] Plasmid constructs suitable for use in AAV particles include those in the sequence listing.

### Example 2. ELISA Assay for Detecting Differential Payload Expression from Regulatory Elements in Various Cell Types

[0663] The HEK293 cell line was transfected with AAV constructs, SEQ ID Nos. 582-591, 609, 617, 623-625, 631, 632, 639, 642, 644, 648, 650, 654, 656, 661, and 662 to assay the level of expression of a Frataxin payload sequence under control of various regulatory elements in human embryonic kidney 293 (HEK293), primary human fibroblast (FA), rat primary dorsal root ganglia (DRG) neurons (rDRG), or human induced pluripotent stem cell (iPSC) derived neural stem cells (hNSC) cell types.

[0664] HEK 293 cells were co-transfected in triplicate using FUGENER HD reagent with each construct (0.5 μg) and the gWiz-GFP plasmid (100 ng) as an internal transfection efficiency control. The transfected 293FT cells were harvested 30-36 hours post-transfection, lysed using the THERMO SCIENTIFIC™ PIERCE™ M-PER™ Mammalian Protein Extraction Reagent, and resuspended in 200 ul of lysis buffer. Protein concentration in each of the samples was measured using the Thermo Scientific™ Pierce™ BCA™ Protein Assay.

[0665] Table 5 shows the titer and the volume of self-complementary AAV (scAAV) constructs comprising frataxin (FXN), PGK, CBA, or CMV promoter sequences and constructs encoding codon-optimized FXN, expressed in HEK-293 cells by three-plasmid transfection method. Lower titers were obtained with FXN and PGK promoters.

TABLE 5
AAV vector titers in HEK293 cells

| | Titer | Volume |
|---|---|---|
| Vector | (GC/ml) | (ml) |
| scAAVrh10.CBA-SV40-FXN | 1.00E+13 | 3.5 |
| scAAVrh10.CBA-SV40-FXNOpti10 | 1.00E+13 | 3.8 |
| scAAVrh10.CMV-SV40-FXN | 1.00E+13 | 4.3 |
| scAAVrh10.CMV-SV40-FXNOpti10 | 1.00E+13 | 3.2 |
| scAAVrh10.FXNpro-SV40-FXN | 1.50E+12 | 3.1 |
| scAAVrh10.FXNpro-SV40-FXNOpti10 | 4.00E+12 | 2.8 |
| scAAVrh10.PGK-SV40-FXN | 1.50E+12 | 3.0 |
| scAAVrh10.PGK-SV40-FXNOpti10 | 5.00E+12 | 3.2 |

[0666] Silver stained SDS-page of vectors listed in Table 5 subsequent to expression in HEK293 cells shows detection of capsid proteins VP1, VP2 and VP3 in proper 1:1:10 ratio.

[0667] Analysis of DNAs within rAAV capsids of Table 5 by native agarose gel electrophoresis and alkaline agarose gel electrophoresis show predominance of self-complementary genomes for CBA, CMV and PGK promoters and empty particles (limited DNA) generated by the FXNpro constructs.

### Example 3. Summary of mRNA Expression of AAV Constructs

[0668] Expression of the transgene was dependent on the capsid and if expression was being evaluated in the motor neurons of the spinal cord or the DRG sensory neurons. Table 6 provides a summary of the expression for each capsid. In Table 6, “NT” means not tested.

TABLE 6
Expression

| | Transgene expression | | FXN-IHC Staining | |
|---|---|---|---|---|
| Capsid | Motor Neuron | DRG | Motor Neuron | DRG |
| AAV2 | +++ | + | NT | Low |
| AAVDJ | +++ | ++ | High | High |
| AAVDJ8 | ++ | + | NT | High |
| AAV6 | ++ | +++ | NT | NT |
| AAVrh10 | +++ | +++ | High for sc | NT |
| AAV9 | + | + | NT | NT |
| AAV5 | +++ | ++ | NT | NT |

[0669] The AAV9 capsid showed the lowest transgene expression in the spinal cord. AAVDJ and AAVrh10 gave the strongest and consistent transgene expression by immunochemistry (IHC) for motor neuron transduction. AAVDJ and AAVDJ8 gave the strongest and consistent transgene expression by IHC for DRG transduction.

### Example 4. Comparison of Human FXN Expression Following Intrastriatal Delivery in Mice of AAV Constructs Containing Three Different Promoters

[0670] To compare human FXN expression driven by PGK, CMV and CBA and FXN promoters, more than 93 wild type mice (C57BL/6), 6-8 weeks old, were administered an AAV with dose levels shown in Tables 7-9. The AAVs were formulated in PBS and 0.001% F-68, and 5 uL administered via intrastriatal (IS) injection. Human FXN (hFXN) protein levels in striatum were quantified after 7 days (Tables 7 and 8) or 28 days (Table 9) by ELISA with an assay (Abcam) specific for human FXN (no detection of mouse FXN).

[0671] Seven days after AAV intrastriatal administration (5E9 VG), all AAV constructs resulted in human frataxin expression. The CBA promoter drove the highest expression, followed by PGK and CMV promoters. The same rank order of promoter-driven expression (CBA>PGK>CMV) was observed with constructs expressing wild-type human frataxin (Table 7) and codon optimized human frataxin (Table 8) at 7 days post-administration. With the CBA promoter, wild-type frataxin (scAAVrh10-CBA-FXN) and codon-optimized frataxin (scAAVrh10-CBA-Opti10FXN) resulted in similar levels of human frataxin protein in the striatum at this time point (Table 8).

TABLE 7
Striatum Levels of human FXN at 7 days Following
Intrastriatal Injection of Wild-Type Frataxin Constructs

| | AAV | | Inj. Site |
|---|---|---|---|
| Test Article | Genome | Dose (VG) | AVG ± SEM |
| scAAVrh10-CBA-FXN | SC | 5 × 10⁹ | 120.1 ± 20.18 |
| scAAVrh10-CMV-FXN | SC | 5 × 10⁹ | 31.20 ± 12.18 |
| scAAVrh10-PGK-FXN | SC | 5 × 10⁹ | 55.49 ± 4.69 |
| Vehicle | — | — | 2.35 ± 1.33 |

TABLE 8
Striatum Levels of human FXN at 7 days Following Intrastriatal
Injection of Codon-Optimized Frataxin (Opti10FXN) Constructs

| | AAV | | Inj. Site |
|---|---|---|---|
| Test Article | Genome | Dose (VG) | AVG ± SEM |
| scAAVrh10-CBA-Opti10FXN | SC | 5 × 10⁹ | 64.12 ± 15.45 |
| scAAVrh10-CMV-Opti10FXN | SC | 5 × 10⁹ | 18.85 ± 3.93 |
| scAAVrh10-PGK-Opti10FXN | SC | 5 × 10⁹ | 29.96 ± 6.16 |
| scAAVrh10-CBA-FXN | SC | 5 × 10⁹ | 61.89 ± 3.77 |
| Vehicle | — | — | 2.00 ± 0.09 |

[0672] Twenty-eight days after AAV intrastriatal administration (5E8, 5E9 or 5E10 VG), all AAV constructs resulted in human frataxin expression in the striatum (Table 9). For all 3 promoters (CBA, CMV, PGK), each log increase in dose resulted in an approximately 6-8 fold increase in human frataxin protein levels in the striatum. The CBA promoter drives the highest level of expression in the striatum, followed by the CMV and PGK promoters. The rank order of promoter-driven expression (CBA>CMV>PGK) was observed at 28 days post-administration, with the CBA promoter resulting in approximately 3-fold higher levels of human FXN protein expression than the CMV promoter, and the CMV promoter resulting in approximately 3-fold higher levels of human FXN protein expression than the PGK promoter, across the dose levels used.

TABLE 9
Striatum Levels of human FXN at 28 days Following Intrastriatal
Injection of Wild-Type and Codon-Optimized Frataxin Constructs

| | AAV | Dose | | Inj. Site | |
|---|---|---|---|---|---|
| Test Article | Genome | (VG) | | AVG ± SEM | |
| scAAVrh10-CBA-FXN | SC | 5 × | 10⁸ | 113.51 ± | 10.32 |
| scAAVrh10-CBA-FXN | SC | 5 × | 10⁹ | 748.53 ± | 120.54 |
| scAAVrh10-CBA-FXN | SC | 5 × | 10¹⁰ | 4915.25 ± | 896.59 |
| scAAVrh10-CMV-FXN | SC | 5 × | 10⁸ | 33.37 ± | 4.91 |
| scAAVrh10-CMV-FXN | SC | 5 × | 10⁹ | 260.67 ± | 12.61 |
| scAAVrh10-CMV-FXN | SC | 5 × | 10¹⁰ | 1687.10 ± | 278.23 |
| scAAVrh10-PGK-FXN | SC | 5 × | 10⁸ | 12.49 ± | 1.02 |
| scAAVrh10-PGK-FXN | SC | 5 × | 10⁹ | 79.93 ± | 1.60 |
| scAAVrh10-PGK-FXN | SC | 5 × | 10¹⁰ | 515.81 ± | 29.32 |
| scAAVrh10-CBA-Opti10FXN | SC | 5 × | 10⁹ | 777.94 ± | 176.08 |
| Vehicle | | | | 5.47 ± | 2.76 |

### Example 5. Comparison of Capsids and Mammals

### A. Rodents Comparison

[0673] Mice (normal e.g., C57BL/6; ˜25 g; n=8) and Rats (e.g., Sprague-Dawley; ˜300 g; n=8) are administered via intrathecal and/or intrastriatal administration either a control of vehicle only (Tributyl citrate (TBC)-180 mM sodium chloride, 10 mM sodium phosphate and 0.001% pluronic acid) or AAVrh10 or AAVDJ serotypes which were packaged with a transgene (FXN).

[0674] During the study, the body weight of each animal is taken weekly, daily observations of the behavior of each animal are recorded and blood and CSF samples pre-dose and post-AAV infusion are taken for analysis. After 6 weeks, the animals are compared for distribution and level of transgene (FXN) expression in spinal cord and DRGs as well as the percent target cell transduction and distribution, relative transduction of peripheral organs. The transduction pattern is evaluated using a method known in the art, and cell tropism using double label against neurological marks.

### B. Rodents Serotype Study-Intrathecal Administration

[0675] Rodents (Sprague-Dawley Rat; n=2 for control and 4 for serotypes) are administered via slow intrathecal administration a bolus (10 ul) of either a control of vehicle only (PBS, 0.001% F-68) or AAV1, AAV2, AAV6, AAV9, AAVrh10, AAVDJ or AAVDJ8 serotypes which were packaged with a transgene (GFP) as outlined in Table 10.

TABLE 10
IT Study Design

| Group | Serotype | Dose (vg) |
|---|---|---|
| 1 | AAV1 | 3.73 × 10¹⁰ |
| 2 | AAV2 | TBD |
| 3 | AAV6 | 3.73 × 10¹⁰ |
| 4 | AAVrh10 | 3.73 × 10¹⁰ |
| 5 | AAVDJ | 3.73 × 10¹⁰ |
| 6 | AAVDJ8 | 3.73 × 10¹⁰ |
| 7 | AAV9 | 3.73 × 10¹⁰ |
| 8 | N/A - Vehicle only | 0 |

[0676] During the study, the body weight of each animal is taken weekly, daily observations of the behavior of each animal are recorded. After 28 days the brain, spinal cord, DRGs, sciatic nerve and sympathetic ganglia, SGC, hind paw skin, liver and heart may be analyzed by methods known in the art such as PFA transcardiac perfusion, IHC and microscope analysis.

### C. Rodents Serotype Study-Intrathecal Administration

[0677] Rodents (Sprague-Dawley Rat; n=2 for control and 4 for serotypes) are administered via slow intrastriatal administration (10 ul at 0.5 ul/min) of either a control of vehicle only (PBS, 0.001% F-68) or AAV1, AAV2, AAV6, AAV9, AAVrh10, AAVDJ or AAVDJ8 serotypes which were packaged with a transgene (GFP) as outlined in Table 11.

TABLE 11
IS Study Design

| Group | Serotype | Dose (vg) |
|---|---|---|
| 1 | AAV1 | 1.9 × 10¹⁰ |
| 2 | AAV2 | TBD |
| 3 | AAV6 | 1.9 × 10¹⁰ |
| 4 | AAVrh10 | 1.9 × 10¹⁰ |
| 5 | AAVDJ | 1.9 × 10¹⁰ |
| 6 | AAVDJ8 | 1.9 × 10¹⁰ |
| 7 | AAV9 | 1.9 × 10¹⁰ |
| 8 | N/A - Vehicle only | 0 |

[0678] During the study, the body weight of each animal is taken weekly, daily observations of the behavior of each animal are recorded. After 28 days the brain, spinal cord, DRGs, sciatic nerve and sympathetic ganglia, SGC, hind paw skin, liver and heart may be analyzed by methods known in the art such as PFA transcardiac perfusion, IHC and microscope analysis.

### D. Non-Human Primates Serotype Study

[0679] Non-human primates (cynomolgus adult male or female prescreen for capsid-specific low anti-AAV antibodies; n=4 per group and 2 control) are administered via intrathecal (L1) administration either a control of vehicle only (Tributyl citrate (TBC)-180 mM sodium chloride, 10 mM sodium phosphate and 0.001% pluronic acid) or AAV2, AAVDJ, AAVDJ8 or AAV1 serotypes which are packaged with a transgene (GFP) at three doses of 1×10¹³ at a rate of 1 ml bolus/hour (total volume 3 ml).

[0680] During the study, the body weight of each animal is taken weekly, daily observations of the behavior of each animal are recorded and blood and CSF samples pre-dose and post-AAV infusion are taken for analysis. Approximately 3 weeks after administration the animals are compared for distribution and level of transgene (GFP) expression in NHP spinal cord and DRGs as well as the percent target cell transduction and distribution, relative transduction of peripheral organs. The transduction patter is evaluated using GFP-IHC and/or GFP-ISH, and cell tropism using double label against neurological marks.

### E. Non-Human Primates Expanded Serotype Study

[0681] Non-human primates are administered via intrathecal and/or intrastriatal administration either AAV1, AAV2, AAV6, AAV9, AAVDJ or AAVDJ8 serotypes which are packaged with a transgene (GFP). Approximately 2-3 weeks after administration the animals are compared for distribution and level of transgene (GFP) expression in NHP spinal cord and DRGs as well as the percent target cell transduction and distribution, relative transduction of peripheral organs. The transduction patter is evaluated using GFP-IHC and/or GFP-ISH, and cell tropism using double label against neurological marks.

### Example 6. Comparison of Capsids and Transgenes

[0682] Non-human primates (n=4; 7 groups; Cynomolgus, pre-screened for capsid-specific low anti-AAV antibodies) are administered by intrathecal administration (L1) at 1 ml bolus/hour, either AAVDJ or AAVrh10 serotypes which are packaged with human or cynomolgus (Cyno) forms of FXN in a delivery vehicle (Tributyl citrate (TBC)-180 mM sodium chloride, 10 mM sodium phosphate and 0.001% pluronic acid). Empty AAVDJ and/or AAVrh10 capsids will be used a controls. The study design is shown in Table 12.

TABLE 12
Expression and Pathology

| Group | Capsid | Genome | Transgene | Dose | Total Volume |
|---|---|---|---|---|---|
| 1 | AAVDJ | SC | Human FXN | 1 × 10¹³ | 3 ml |
| 2 | AAVrh10 | SC | Human FXN | 1 × 10¹³ | 3 ml |
| 3 | AAVrh10 | SC | Cyno FXN | 1 × 10¹³ | 3 ml |
| 4 | AAVrh10 | SC | Cyno FXN | 1 × 10¹² | 3 ml |
| 5 | AAVrh10 | SC | Cyno FXN | TBD | 3 ml |
| 6 | AAVDJ | — | — | 0 | 3 ml |
| 7 | AAVrh10 | — | — | 0 | 3 ml |

[0683] During the study, the body weight of each animal is taken weekly, daily observations of the behavior of each animal are recorded and blood and CSF samples pre-dose and post-AAV infusion are taken for analysis. After 6 weeks the expression of the transgene and pathology will be conducted on all NHPs to determine the effect of the capsid, transgene (human (non-self) vs. cynomolgus (self)), dose and immune reaction to the capsid and/or transgene.

### Example 7. Comparison Systemic Delivery of Capsids

### A. Intravascular Injection

[0684] C57BL/6 mice (n=1-5) were administered by bolus tail vein intravascular injection administration a dose as outlined in Table 13 of either AAV9, AAV2, AAV5, AAV6, AAVrh10, AAVDJ8 or AAVDJ serotypes which were packaged with FXN in a delivery vehicle (PBS, 5% sorbitol and 0.001% F-68) or the delivery vehicle alone. The study design is shown in Table 13.

TABLE 13
Study Design

| | | | | | | Total Volume |
|---|---|---|---|---|---|---|
| Test Article | Capsid | Genome | n | Dose (vg) | | (ul) |
| VCAV-01801-B | AAV9 | SC | 5 | 5 × | 10¹¹ | 100 |
| VCAV-01791 | AAV9 | SS | 5 | 5 × | 10¹¹ | 100 |
| VCAV-01870 | AAV2 | SS | 5 | 5 × | 10¹¹ | 100 |
| VCAV-01871 | AAV5 | SS | 5 | 5 × | 10¹¹ | 100 |
| VCAV-01851 | AAV6 | SS | 5 | 5 × | 10¹¹ | 100 |
| VCAV-01842 | AAVrh10 | SS | 5 | 5 × | 10¹¹ | 100 |
| VCAV-01962 | AAVrh10 | SC | 2 | 5 × | 10¹¹ | 100 |
| | | | 1 | 2.5 × | 10¹¹ | 100 |
| VCAV-01888 | AAVDJ8 | SS | 4 | 5 × | 10¹¹ | 100 |
| | | | 1 | 2.5 × | 10¹¹ | 100 |
| VCAV-01858 | AAVDJ | SS | 4 | 5 × | 10¹¹ | 100 |
| | | | 1 | 2.5 × | 10¹¹ | 100 |

| | | | | | |
|---|---|---|---|---|---|
| Vehicle | — | — | 5 | — | 100 |

[0685] During the study (4 weeks), the body weight of each animal was taken prior to administration and weekly during the study, daily observations of the behavior of each animal were recorded and blood and CSF samples pre-dose and post-AAV infusion are taken for analysis. After 4 weeks, serum was collected as well as samples of the liver (L), cortex (Ctx), Striatum (Cpu), Hippocampus (Hipp), Thalamus (TH), Hemisphere (HP), Cervical spinal cord (SC-C), Thoracic spinal cord (SC-T), Lumbar spinal cord (SC-L), Brainstem (Br), Cerebellum (Cb), Heart (H), Lung, Kidney (K), Spleen (S), Gastrocnemius muscle (SM), and DRG.

[0686] Most of the groups continued to gain body weight during the study period. The scAAVrh10 group started to lose body weight four weeks after injection.

[0687] Levels of human frataxin in mouse liver on day 28 are shown in Table 14. scAAVrh10 resulted in the highest frataxin expression in the liver (scAAVrh10>scAAV9>ssAAVDJ8>ssAAVrh10>ssAAVDJ>ssAAV6>ssAAV9>ssAAV5>ssAAV2). Self-complementary AAV9 and AAVrh10 resulted in 26 and 18 fold higher expression in the liver than single-stranded vectors, respectfully. Of all the single-stranded vectors, ssAAVDJ8 resulted in the highest liver levels.

TABLE 14
Human Frataxin Levels

| Vector | Frataxin (ng/mg) |
|---|---|
| scAAVrh10 | 19,428 |
| scAAV9 | 8,883 |
| ssAAVDJ8 | 1,849 |
| ssAAVrh10 | 1,057 |
| ssAAVDJ | 811 |
| ssAAV6 | 569 |
| ssAAV9 | 340 |
| ssAAV5 | 90 |
| ssAAV2 | 81 |

[0688] Human frataxin was detected in both the mouse cortex and striatum for scAAV9, scAAVrh10 and ssAAVDJ8. scAAV9 injection resulted in the highest frataxin expression (˜2 ng frataxin/mg protein) in both the cortex and striatum (scAAV9>scAAVrh10>ssAAVDJ8).

[0689] Human frataxin was detected in serum on day 28 in the scAAVrh10 and scAAV9 groups.

### B. Intravascular and Intrastriatal Injection

[0690] C57BL/6 mice (n=2-5) were administered by bolus tail vein intravascular injection (IV) (1×10¹² vg/100 ul) or intrastriatal CM infusion (IS) (5×10¹⁰ vg/4 ul over 10 minute infusion) as outlined in Table 15 of either AAV9, AAVrh10, or AAVDJ8 serotypes which were packaged with FXN in a delivery vehicle (PBS, 5% sorbitol and 0.001% F-68) or the delivery vehicle alone. The study design is shown in Table 15.

TABLE 15
Study Design

| Test Article | Capsid | Genome | n | Route | Dose (vg) |
|---|---|---|---|---|---|
| VCAV-01801-B | AAV9 | SC | 4 | IV | 1 × 10¹² |
| VCAV-01962 | AAVrh10 | SC | 4 | IV | 1 × 10¹² |
| VCAV-01888 | AAVDJ8 | SS | 5 | IV | 1 × 10¹² |
| VCAV-01801-B | AAV9 | SC | 3 | IS | 5 × 10¹⁰ |
| VCAV-01962 | AAVrh10 | SC | 2 | IS | 5 × 10¹⁰ |
| VCAV-01888 | AAVDJ8 | SS | 3 | IS | 5 × 10¹⁰ |

[0691] During the study (4 weeks), the body weight of each animal was taken prior to administration and weekly during the study, daily observations of the behavior of each animal were recorded and blood and CSF samples pre-dose and post-AAV infusion are taken for analysis. After 4 weeks, serum was collected as well as samples of the liver (L), cortex (Ctx), Striatum (Cpu), Hippocampus (Hipp), Thalamus (TH), Hemisphere (HP), Cervical spinal cord (SC-C), Thoracic spinal cord (SC-T), Lumbar spinal cord (SC-L), Brainstem (Br), Cerebellum (Cb), Heart (H), Lung, Kidney (K), Spleen (S), Gastrocnemius muscle (SM), and DRG.

[0692] Most of the groups continued to gain body weight during the study period. The scAAVrh10 group started to lose body weight three weeks after injection.

[0693] For IV injection, the greatest expression was seen in the liver and the lowest was seen in the striatum and cortex (Liver>DRG>spinal cord>cortex and striatum).

[0694] Levels of human frataxin in mouse liver on day 28 are shown in Table 16 for IV injection. scAAVrh10 resulted in the highest frataxin expression in the liver after IV injection (scAAVrh10>scAAV9>ssAAVDJ8).

TABLE 16
Human Frataxin Levels in the Liver After IV Administration

| Vector | Frataxin (ng/mg) |
|---|---|
| scAAVrh10 | 34,303 |
| scAAV9 | 11,939 |
| ssAAVDJ8 | 3,285 |

[0695] Human frataxin was detected in both the mouse cortex and striatum on day 28 following IV injection and in the striatum for IS administration as shown in Tables 17 and 18. scAAV9 and scAAVrh10 showed the highest expression for IV and IS administration for the striatum and in the cortex for IV administration scAAV9 and scAAVrh10 also showed the highest expression.

TABLE 17
Human Frataxin Levels in the Striatum

| Route of | | |
|---|---|---|
| Administration | Vector | Frataxin (ng/mg) |
| IV | scAAV9 | 1 |
| | scAAVrh10 | 1 |
| | ssAAVDJ8 | 0.3 |
| IS | scAAV9 | 4,713 |
| | scAAVrh10 | 3,793 |
| | ssAAVDJ8 | 655 |

TABLE 18
Human Frataxin Levels in the Cortex

| Route of | | |
|---|---|---|
| Administration | Vector | Frataxin (ng/mg) |
| IV | scAAV9 | 1 |
| | scAAVrh10 | 1 |
| | ssAAVDJ8 | 0.4 |

[0696] Human frataxin was detected in the spinal cord and DRG on day 28 following IV injection as shown in Table 19. scAAVrh10 showed the highest expression in the spinal cord and DRG. ssAAVDJ8 had the second highest in the spinal cord and was the lowest in DRG. scAAV9 was the second highest in DRG and the lowest in the spinal cord.

TABLE 19
Human Frataxin Levels in the Striatum

| Route of | | Frataxin (ng/mg) | |
|---|---|---|---|
| Administration | Vector | Spinal Cord | DRG |
| IV | scAAV9 | 2 | 12 |
| | scAAVrh10 | 5 | 16 |
| | ssAAVDJ8 | 3 | 5 |

### Example 8. Non-Human Primate Intrathecal Delivery Study

[0697] Non-human primates (NHPs) (n=24 male Cynomolgus with low serum anti-AAV antibody titers) were administered an AAV particle, serotype rh.10 and self-complementary (SC), via bolus or continuous intrathecal (IT) delivery using implanted chronic catheters with tips at cervical and/or lumbar levels as outlined in Table 20.

TABLE 20
Study Design

| Group | Description | Site(s) | Rate | Vol. | | Conc. (vg/ml) | Dose (vg) | N |
|---|---|---|---|---|---|---|---|---|
| 1 | Bolus; IT-lumbar | L1 | Bolus | 1 | ml | 1 × 10¹³ | 1 × 10¹³ | 4 |
| 2 | Bolus; IT-cervical | C1 | Bolus | 1 | ml | 1 × 10¹³ | 1 × 10¹³ | 4 |
| 3 | 10 h infusion; high | L1 | 0.1 ml/h | 1 | ml | 1 × 10¹³ | 1 × 10¹³ | 4 |
| | titer/low volume | | | | | | | |
| 4 | 10 h infusion; high | C1 | 0.1 ml/h | 1 | ml | 1 × 10¹³ | 1 × 10¹³ | 4 |
| | titer/low volume | | | | | | | |
| 5 | 10 h infusion; low | L1 | 1.0 ml/h | 10 | ml | 1 × 10¹³ | 1 × 10¹³ | 4 |
| | titer/high volume | | | | | | | |
| 6 | 10 h infusion; low | C1 | 1.0 ml/h | 10 | ml | 0.1 × 10¹³ | 1 × 10¹³ | 4 |
| | titer/high volume | | | | | | | |

[0698] The study compared the location of administration as well as infusion rate and volume. The severity of ganglion infiltrates and neuronal degeneration in DRG and the spinal cord varied among the groups. Lumbar was greater than cervical groups and the slow 1 mL infusion was greater than the 10 mL infusion which was greater than the 1 mL bolus.

### Example 9. Intrathecal Delivery Study

[0699] Pigs (n=6 Gottingen minipigs) were administered an AAV particle, serotype rh.10, via bolus or continuous intrathecal (IT) delivery using implanted chronic catheters with tips at cervical, thoracic and/or lumbar levels as outlined in Table 21.

TABLE 21
Study Design

| Group | Description | Site(s) | Rate | Vol. | | Conc. (vg/ml) | Dose (vg) | N |
|---|---|---|---|---|---|---|---|---|
| 1 | 1-site bolus | Cervical | Slow Bolus | 3 | ml | 1 × 10¹³ | 3 × 10¹³ | 2 |
| 2 | 3-site bolus | Cervical | Slow Bolus | 3 × 1 | ml | 1 × 10¹³ | 3 × 10¹³ | 2 |
| | | Thoracic | | | | | | |
| | | Lumbar | | | | | | |
| 3 | 1-site 10-hour | Cervical | 1.0 ml/h | 10 | ml | 0.3 × 10¹³ | 3 × 10¹³ | 2 |
| | infusion | | | | | | | |

[0700] The study compared the location of administration as well as infusion rate and volume. There was successful expression of the protein in both the spinal cord and DRG after intrathecal delivery. Greater transduction/distribution S1>L1>C4 spinal cord and overall greater transduction in spinal cord from 3 site injections and in DRG from cervical bolus. There were no adverse pathology findings in this study.

### Example 10. Animal Models

[0701] AAV9, AAV2, AAV1, AAV5, AAV6, AAVrh10, AAVDJ8 or AAVDJ serotypes which were packaged with FXN having either a full length or functional deleted mutant of CBA, CMV, PGK or FXN promoter. The AAV particles are administered in a delivery vehicle (PBS, 5% sorbitol and 0.001% F-68) or the delivery vehicle alone is administered by intraparenchymal administration, intracerebroventricular infusion or intrathecal infusion to at least one set of mice from the mouse models described in Table 22 (From Table 1 of Martelli et al. 2012, the contents of which is herein incorporated by reference). To evaluate the effect of different dosages, a low, medium and high vector dose is administered with a 10-fold dose escalation between the dose levels.

TABLE 22
Mouse Models

| Model | Model/ | |
|---|---|---|
| Type | Genotype | Notes/Phenotype |
| Knockout | FXN- | Embryonic lethality during gastrulation |
| | knockout | (Cossee et al. 2000) |
| | mouse | |
| Conditional | MCK- | Muscle creatine promoter. FXN deletion in heart |
| mouse | Cre | and skeletal muscle. Reduced lifespan (76 +/− |
| models | | 10 days) and hyper trophic cardiomyopathy but |
| of FXN | | no skeletal muscle phenotype. Early Fe—S |
| deletion | | cluster deficit and late mitochondrial iron |
| | | accumulation. |
| | | No sign of oxidative stress (Puccio et al. 2001) |
| | NSE-Cre | Neuron-specific enolase promoter. FXN deletion |
| | | in nervous system, heart and liver. Reduced |
| | | lifespan (29 ± 9 days). Severe neuronal and |
| | | cardiac phenotype (Puccio et al. 2001) |
| | Prp- | Tamoxifen-inducible Cre, prion promoter. Fxn |
| | CreER | deletion in DRG and cerebellum. Progressive |
| | | spinocerebellar and sensory ataxia. |
| | | Neurodegeneration of sensory neurons in DRG |
| | | and granular layer in cerebellum. Abnormal |
| | | autophagy in DRG. (Simon et al. 2004) |
| | Ins2-Cre | Insulin promoter. Fxn deletion in pancreatic β- |
| | | cells; diabetes mellitus (Ristow et al. 2003) |
| | ALB-Cre | Albumin promoter. Fxn deletion in hepatocytes. |
| | | Tumor formation or liver regeneration. |
| | | (Thierbach et al. 2005) |
| Mouse | KIKI | Double knock-in with 230 GAA repeats. No |
| models | | overt phenotype. Transcriptional deregulation |
| with GAA | | involving the PPAR pathway. Markers of |
| expansions | | heterochromatin on the GAA tract. (Miranda et |
| in FXN | | al. 2002) |
| | KIKO | Simple knock-in crossed with knockout mouse. |
| | | 26-32% residual frataxin expression. No overt |
| | | phenotype. Transcriptional deregulation |
| | | involving the PPAR pathway. (Miranda et al. |
| | | 2002) |
| | YG8R | YAC containing the full human FXN locus with |
| | | a GAA expansion and deleted for endogenous |
| | | murine frataxin. Progressive ataxia with affected |
| | | DRG. No cardiopathy but mitochondrial iron |
| | | accumulation and lipid peroxidation. Markers of |
| | | heterochromatin on the GAA tract. Tissue |
| | | dependent GAA instability. (Al-Mahdawi et al. |
| | | 2006) |

[0702] During the study, the body weight of each animal is taken weekly, daily observations of the behavior of each animal are recorded and blood and CSF samples pre-dose and post-AAV infusion are taken for analysis. After about 6-8 weeks, the animals are compared for distribution and level of transgene (FXN) expression in neural tissues (e.g., brain, spinal cord, DRGs) as well as the percent target cell transduction and distribution, relative transduction of peripheral organs (e.g., liver, heart and pancreas). The transduction pattern is evaluated using a method known in the art, and cell tropism using double label against neurological marks.

### Example 11. Non Human Primate Study

[0703] 5 groups of adult non-human primates (n=2-3 per group; Cynomolgus) are pre-screened for serotype-specific low anti-AAV antibody levels. The non-human primates will be pre-implanted with catheters and left in place after delivery for CSF sampling. Delivery of the AAV particles (capsids may be selected from AAV9, AAV2, AAV1, AAV5, AAV6, AAVrh10, AAVDJ8 or AAVDJ serotypes; promoter may be either a full length or functional deleted mutant of CBA, CMV, PGK or FXN; payload is either wild type or non-wild type FXN) in a delivery vehicle (e.g., PBS, 5% sorbitol and 0.001% F-68) or delivery vehicle alone to the non-human primates will be by intrathecal lumbar administration by continuous infusion at a rate of 1 ml over 1 hour. Study design is shown in Table 23 where subscript X and Y refer to different capsids and subscript 1 and 2 refer to different promoters.

[0704] To evaluate the effect of different dosages, a low, medium and high vector dose is administered with a 10-fold dose escalation between the dose levels.

TABLE 23
Study Design

| | Vector Dose | | |
|---|---|---|---|
| Treatment Group | Low | Medium | High |
| AAV_{X}-Promoter₁-hFXN | n = 2 | n = 2 | n = 3 |
| AAV_{X}-Promoter₂-hFXN | n = 2 | n = 2 | n = 3 |
| AAV_{Y}-Promoter₁-hFXN | n = 2 | n = 2 | n = 3 |
| AAV_{Y}-Promoter₂-hFXN | n = 2 | n = 2 | n = 3 |
| Vehicle Control (n = 2) | n/a | n/a | n/a |

[0705] During the study, daily observations of the behavior of each animal are recorded and blood and (baseline, 1-7 days post infusion and biweekly thereafter) and CSF samples (baseline, weekly post infusion if catheters remain usable and at necropsy) are taken for analysis. After about 8 weeks, blood and CSF analysis for the AAV levels (acute time points) and anti-AAV antibodies is gathered for each animal. Animals are perfused with heparinized saline and the distribution and level of transgene (FXN) expression in neural tissues (e.g., brain, spinal cord, DRGs) as well as the percent target cell transduction and distribution, relative transduction of peripheral organs (e.g., liver, heart and pancreas) is determined. Tissue samples will be frozen for molecular and biochemical analysis and/or placed in ice-cold paraformaldehyde for histological evaluation for molecular biology aspects (e.g., vector DNA, mRNA (PCR)), biochemistry (FXN protein (Mass spectrometry, ELISA)) and neurohistology (FXN immunochemistry and in situ hybridization). One set of fixed specimens can also be sent for independent, blinded histopathological evaluation.

### Example 12. CSF Flow Dynamics Studies

[0706] The CSF flow of non-human primates (N=8; adult cynomolgus) is studied by MRI imaging. The study is conducted with and without implant IT catheter (cervical N=4; lumbar N=4).

[0707] Particle distribution in the CSF is studied by administering non-human primates (N=8; adult cynomolgus) Gadoluminate via implant IT catheter (cervical N=4; lumbar N=4). The Gadoluminate dosing is bolus (1 ml) and 10 hour infusion (1 ml/h). The particle distribution is monitored by MRI imaging.

[0708] Particle distribution in the CSF compared to AAV expression is studied by administering non-human primates (N=8; adult cynomolgus) Gadoluminate and AAV serotype packaged with GFP via implant IT catheter (cervical N=4; lumbar N=4). The particle distribution is monitored by MRI imaging. The AAV expression is analyzed by immunohistochemistry after necropsy.

### Example 13. Dose Response Study

[0709] Non-human primates (n=4; 6 groups; cynomolgus 3-years old, pre-screened for capsid-specific low anti-AAV antibodies) are administered using an IT-lumbar implanted catheter at L1, two 1 ml bolus/hour infusions of self-complementary CBA-hFXN vector (vehicle—PBS with 0.001% F-68) via intrathecal (IT) administration. Empty capsids and vehicle alone will be used a controls. The study design is shown in Table 24.

TABLE 24
Study Design

| Group | Capsid | Genome | Transgene | Dose (vg) |
|---|---|---|---|---|
| 1 | Vehicle | — | — | N/A |
| | (PBS) | | | |
| 2 | Empty | — | — | 2 × 10¹³ |
| | Vector | | | |
| 3 | AAVDJ | SC | Human FXN | 2 × 10¹³ |
| 4 | AAVDJ | SC | Human FXN | 2 × 10¹² |
| 5 | AAVrh10 | SC | Human FXN | 2 × 10¹¹ |
| 6 | AAVDJ | SC | Human FXN | 2 × 10¹⁰ |

[0710] During the study, the body weight of each animal is taken weekly, daily observations of the behavior of each animal are recorded and blood and CSF samples pre-dose and post-AAV infusion are taken for analysis. At the end of the study, the expression of the transgene and pathology will be conducted on all NHPs to determine the effect of the capsid, dose and immune reaction to the capsid.

### Example 14. Comparison of Capsids

[0711] Non-human primates (n=4; 6 groups; cynomolgus, pre-screened for capsid-specific low anti-AAV antibodies) are administered by intrathecal administration (L1) at 1 ml bolus/hour, either an AAV particle (self-complementary and CBA promoter) described in Table 25 in a delivery vehicle. The study design is shown in Table 25.

TABLE 25
Expression and Pathology

| Group | Capsid | Transgene | Dose (vg) | Total Volume |
|---|---|---|---|---|
| 1 | AAV2 | GFP | ≤3 × 10¹³ | Up to 3 ml |
| 2 | AAVDJ | GFP | ≤3 × 10¹³ | Up to 3 ml |
| 3 | AAVDJ8 | GFP | ≤3 × 10¹³ | Up to 3 ml |
| 4 | AAV1 | GFP | ≤3 × 10¹³ | Up to 3 ml |
| 5 | AAV6 | GFP | ≤3 × 10¹³ | Up to 3 ml |
| 6 | AAV9 | GFP | ≤3 × 10¹³ | Up to 3 ml |

[0712] During the study, the body weight of each animal is taken weekly, daily observations of the behavior of each animal are recorded and blood and CSF samples pre-dose and post-AAV infusion are taken for analysis. At the end of the study (approximately 3 weeks) the expression of the transgene and pathology will be conducted on all NHPs to determine the effect of the capsid, and immune reaction to the capsid.

### Example 15. IT Volume Comparison

[0713] Rodents (n=8; 6 groups) are administered by intrathecal administration a slow small volume or a rapid large volume in the Trendelenburg position a composition of AAV particle (self-complementary, CBA promoter, rh10 capsid and an HA (human influenza hemagglutinin) tag) described in Table 26 in a delivery vehicle at a dose of 9×10¹⁰ vg (0.7 ml at 6.7×10¹² vg/ml). The study design is shown in Table 26.

TABLE 26
Expression and Pathology

| | | | Saline | | | | Inj. |
|---|---|---|---|---|---|---|---|
| | | Injection | Flush Vol. | Total Vol. | Inj. Vol. | Flow Rate | Duration |
| Group | Site | Vol. (ul) | (ul) | (ul) | (ul) | (ul/min) | (min) |
| 1 | L1 (CM entry) | 15 | 5 | 21 | 15 | 1 | 21 |
| 2 | C5 (CM entry) | 15 | 5 | 21 | 15 | 1 | 21 |
| 3 | L1 (L5 or | 30 | 45 | 76 | 70 | 150 | 0.5 |
| | CM entry) | | | | | | |
| 4 | L1 (L5 or | 15 | 5 | 21 | 15 | 1 | 21 (in head, |
| | CM entry) | | | | | | down tilt) |
| 5 | C5 (CM entry) | 15 | 5 | 21 | 15 | 1 | 21 (in head, |
| | | | | | | | down tilt) |
| 6 | C5, T1, L1 | 15 each | 5 once | 51 | 45 | 1 | 51 |
| | (CM entry) | (C, T, L) | | | | | |

[0714] During the study, the body weight of each animal is taken weekly, daily observations of the behavior of each animal are recorded and blood and CSF samples pre-dose and post-AAV infusion are taken for analysis. At the end of the study the expression of the transgene (FXN) and pathology will be conducted on all rodents to determine the effect of the capsid, and immune reaction to the capsid in the cervical, thoracic, lumbar, spinal cord and DRGs.

[0715] While the present invention has been described at some length and with some particularity with respect to the several described embodiments, it is not intended that it should be limited to any such particulars or embodiments or any particular embodiment, but it is to be construed with references to the appended claims so as to provide the broadest possible interpretation of such claims in view of the prior art and, therefore, to effectively encompass the intended scope of the invention.

[0716] All publications, patent applications, patents, and other references mentioned herein are incorporated by reference in their entirety. In case of conflict, the present specification, including definitions, will control. In addition, section headings, the materials, methods, and examples are illustrative only and not intended to be limiting.

We claim:

1. A method of increasing the level of a protein in the CNS of a subject in need thereof comprising administering to said subject an effective amount of an AAV particle comprising a vector genome packaged in a capsid, said capsid having a serotype selected from the group consisting of AAVrh.10 (AAVrh10), AAV-DJ (AAVDJ), AAV-DJ8 (AAVDJ8), AAV1, AAV2, AAV2G9, AAV3, AAV3a, AAV3b, AAV3-3, AAV4, AAV4-4, AAV5, AAV6, AAV6.1, AAV6.2, AAV6.1.2, AAV7, AAV7.2, AAV8, AAV9, AAV9.11, AAV9.13, AAV9.16, AAV9.24, AAV9.45, AAV9.47, AAV9.61, AAV9.68, AAV9.84, AAV9.9, AAV10, AAV11, AAV12, AAV16.3, AAV24.1, AAV27.3, AAV42.12, AAV42-1b, AAV42-2, AAV42-3a, AAV42-3b, AAV42-4, AAV42-5a, AAV42-5b, AAV42-6b, AAV42-8, AAV42-10, AAV42-11, AAV42-12, AAV42-13, AAV42-15, AAV42-aa, AAV43-1, AAV43-12, AAV43-20, AAV43-21, AAV43-23, AAV43-25, AAV43-5, AAV44.1, AAV44.2, AAV44.5, AAV223.1, AAV223.2, AAV223.4, AAV223.5, AAV223.6, AAV223.7, AAV1-7/rh.48, AAV1-8/rh.49, AAV2-15/rh.62, AAV2-3/rh.61, AAV2-4/rh.50, AAV2-5/rh.51, AAV3.1/hu.6, AAV3.1/hu.9, AAV3-9/rh.52, AAV3-11/rh.53, AAV4-8/r11.64, AAV4-9/rh.54, AAV4-19/rh.55, AAV5-3/rh.57, AAV5-22/rh.58, AAV7.3/hu.7, AAV16.8/hu.10, AAV16.12/hu.11, AAV29.3/bb.1, AAV29.5/bb.2, AAV106.1/hu.37, AAV114.3/hu.40, AAV127.2/hu.41, AAV127.5/hu.42, AAV128.3/hu.44, AAV130.4/hu.48, AAV145.1/hu.53, AAV145.5/hu.54, AAV145.6/hu.55, AAV161.10/hu.60, AAV161.6/hu.61, AAV33.12/hu.17, AAV33.4/hu.15, AAV33.8/hu.16, AAV52/hu.19, AAV52.1/hu.20, AAV58.2/hu.25, AAVA3.3, AAVA3.4, AAVA3.5, AAVA3.7, AAVC1, AAVC2, AAVC5, AAVF3, AAVF5, AAVH2, AAVrh.72, AAVhu.8, AAVrh.68, AAVrh.70, AAVpi.1, AAVpi.3, AAVpi.2, AAVrh.60, AAVrh.44, AAVrh.65, AAVrh.55, AAVrh.47, AAVrh.69, AAVrh.45, AAVrh.59, AAVhu.12, AAVH6, AAVLK03, AAVH-1/hu.1, AAVH-5/hu.3, AAVLG-10/rh.40, AAVLG-4/rh.38, AAVLG-9/hu.39, AAVN721-8/rh.43, AAVCh.5, AAVCh.5R1, AAVcy.2, AAVcy.3, AAVcy.4, AAVcy.5, AAVCy.5R1, AAVCy.5R2, AAVCy.5R3, AAVCy.5R4, AAVcy.6, AAVhu.1, AAVhu.2, AAVhu.3, AAVhu.4, AAVhu.5, AAVhu.6, AAVhu.7, AAVhu.9, AAVhu.10, AAVhu.11, AAVhu.13, AAVhu.15, AAVhu.16, AAVhu.17, AAVhu.18, AAVhu.20, AAVhu.21, AAVhu.22, AAVhu.23.2, AAVhu.24, AAVhu.25, AAVhu.27, AAVhu.28, AAVhu.29, AAVhu.29R, AAVhu.31, AAVhu.32, AAVhu.34, AAVhu.35, AAVhu.37, AAVhu.39, AAVhu.40, AAVhu.41, AAVhu.42, AAVhu.43, AAVhu.44, AAVhu.44R1, AAVhu.44R2, AAVhu.44R3, AAVhu.45, AAVhu.46, AAVhu.47, AAVhu.48, AAVhu.48R1, AAVhu.48R2, AAVhu.48R3, AAVhu.49, AAVhu.51, AAVhu.52, AAVhu.54, AAVhu.55, AAVhu.56, AAVhu.57, AAVhu.58, AAVhu.60, AAVhu.61, AAVhu.63, AAVhu.64, AAVhu.66, AAVhu.67, AAVhu.14/9, AAVhu.t 19, AAVrh.2, AAVrh.2R, AAVrh.8, AAVrh.8R, AAVrh.12, AAVrh.13, AAVrh.13R, AAVrh.14, AAVrh.17, AAVrh.18, AAVrh.19, AAVrh.20, AAVrh.21, AAVrh.22, AAVrh.23, AAVrh.24, AAVrh.25, AAVrh.31, AAVrh.32, AAVrh.33, AAVrh.34, AAVrh.35, AAVrh.36, AAVrh.37, AAVrh.37R2, AAVrh.38, AAVrh.39, AAVrh.40, AAVrh.46, AAVrh.48, AAVrh.48.1, AAVrh.48.1.2, AAVrh.48.2, AAVrh.49, AAVrh.51, AAVrh.52, AAVrh.53, AAVrh.54, AAVrh.56, AAVrh.57, AAVrh.58, AAVrh.61, AAVrh.64, AAVrh.64R1, AAVrh.64R2, AAVrh.67, AAVrh.73, AAVrh.74, AAVrh8R, AAVrh8R A586R mutant, AAVrh8R R533A mutant, AAAV, BAAV, caprine AAV, bovine AAV, AAVhE1.1, AAVhEr1.5, AAVhER1.14, AAVhEr1.8, AAVhEr1.16, AAVhEr1.18, AAVhEr1.35, AAVhEr1.7, AAVhEr1.36, AAVhEr2.29, AAVhEr2.4, AAVhEr2.16, AAVhEr2.30, AAVhEr2.31, AAVhEr2.36, AAVhER1.23, AAVhEr3.1, AAV2.5T, AAV-PAEC, AAV-LK01, AAV-LK02, AAV-LK03, AAV-LK04, AAV-LK05, AAV-LK06, AAV-LK07, AAV-LK08, AAV-LK09, AAV-LK10, AAV-LK11, AAV-LK12, AAV-LK13, AAV-LK14, AAV-LK15, AAV-LK16, AAV-LK17, AAV-LK18, AAV-LK19, AAV-PAEC2, AAV-PAEC4, AAV-PAEC6, AAV-PAEC7, AAV-PAEC8, AAV-PAEC 11, AAV-PAEC12, AAV-2-pre-miRNA-101, AAV-8h, AAV-8b, AAV-h, AAV-b, AAV SM 10-2, AAV Shuffle 100-1, AAV Shuffle 100-3, AAV Shuffle 100-7, AAV Shuffle 10-2, AAV Shuffle 10-6, AAV Shuffle 10-8, AAV Shuffle 100-2, AAV SM 10-1, AAV SM 10-8, AAV SM 100-3, AAV SM 100-10, BNP61 AAV, BNP62 AAV, BNP63 AAV, AAVrh.50, AAVrh.43, AAVrh.62, AAVrh.48, AAVhu.19, AAVhu.11, AAVhu.53, AAV4-8/rh.64, AAVLG-9/hu.39, AAV54.5/hu.23, AAV54.2/hu.22, AAV54.7/hu.24, AAV54.1/hu.21, AAV54.4R/hu.27, AAV46.2/hu.28, AAV46.6/hu.29, AAV128.1/hu.43, true type AAV (ttAAV), UPENN AAV 10 and/or Japanese AAV 10 serotypes, and variants thereof.

2. The method of claim 1, wherein the capsid is AAVrh10.

3. The method of claim 1, wherein the capsid is AAV-DJ.

4. The method of claim 1, wherein the capsid is AAV-DJ8.

5. The method of claim 1, wherein the vector genome comprises a promoter, and wherein said promoter is selected from the group consisting of CBA, CMV, PGK, FXN, H1, and fragments or variants thereof.

6. The method of claim 5, wherein the promoter is CBA.

7. The method of claim 5, wherein the promoter is CMV.

8. The method of claim 5, wherein the promoter is FXN.

9. The method of claim 5, wherein the promoter is H1.

10. The method of any of claims 1-9, wherein the administration is a route selected from the group consisting of intrathecal (IT) administration, intraparenchymal (IPa) administration, and intracerebroventricular (ICV) administration.

11. The method of claim 10, wherein the route is IT administration.

12. The method of claim 11, wherein IT administration occurs in at least one location in at least one region of the spine of the subject, and wherein the at least one region of the spine of the subject is selected from the group consisting of cervical, thoracic, lumbar and sacral region.

13. The method of claim 11, wherein IT administration occurs in the cervical region, and wherein IT administration to the cervical region occurs in at least one location selected from the group consisting of C1, C2, C3, C4, C5, C6, and C7.

14. The method of claim 11, wherein IT administration occurs in the thoracic region, and wherein IT administration to the thoracic region occurs in at least one location selected from the group consisting of T1, T2, T3, T3, T4, T5, T6, T7, T8, T9, T10, T11, and T12.

15. The method of claim 11, wherein the IT administration occurs in the lumbar region, and wherein IT administration to the lumbar region occurs in at least one location selected from the group consisting of L1, L2, L3, L4, and L5.

16. The method of claim 11, wherein IT administration occurs in the lumbar region, and wherein IT administration to the sacral region occurs in at least one location selected from the group consisting of S1, S2, S3, S4, and S5.

17. The method of any of claims 12-16, wherein IT administration occurs in one location.

18. The method of claim 17, wherein the location is C1.

19. The method of claim 17, wherein the location is C5.

20. The method of claim 17, wherein the location is T1.

21. The method of claim 17, wherein the location is L1.

22. The method of claim 17, wherein the location is L5.

23. The method of any of claims 12-16, wherein IT administration occurs in three locations.

24. The method of claim 23, wherein the locations are L1, T1 and C5.

25. The method of claim 11, wherein the volume of IT administration is less than 1 mL.

26. The method of claim 11, wherein the volume of IT administration is between about 0.1 mL to about 120 mL.

27. The method of any of claims 11-24, wherein the IT administration is via bolus infusion.

28. The method of any of claims 11-24, wherein the IT administration is via prolonged infusion.

29. The method of claim 28, wherein the prolonged infusion occurs at a volume of more than 1 mL.

30. The method of claim 29, wherein the prolonged infusion occurs at a volume of at least 3 mL.

31. The method of claim 29, wherein the prolonged infusion occurs at a volume of 3 mL.

32. The method of claim 29, wherein the prolonged infusion occurs at a volume of at least 10 mL.

33. The method of claim 29, wherein the prolonged infusion occurs at a volume of 10 mL.

34. The method of claim 28, wherein the prolonged infusion occurs for at least a duration selection from the group consisting of 0.17, 0.33, 0.5, 0.67, 0.83, 1, 2, 3, 4, 5, 6, 7, 8, 9, 10, 11, 12, 13, 14, 15, 16, 17, 18, 19, 20, 21, 22, 23, 24, 25, 26, 27, 28, 29, 30, 31, 32, 33, 34, 35, and 36 hour(s).

35. The method of claim 34, wherein the duration is at least one hour.

36. The method of claim 34, wherein the duration is at least 10 hours.

37. The method of claim 28, wherein the prolonged infusion occurs at a constant rate.

38. The method of claim 28, wherein the prolonged infusion occurs at a ramped rate.

39. The method of claim 38, wherein the ramped rate increases over the duration of the prolonged infusion.

40. The method of claim 28, wherein the prolonged infusion occurs at a complex rate alternating between high and low rates over the duration of the prolonged infusion.

41. The method of any one of claims 29-40, wherein the rate of prolonged infusion is between about 0.1 mL/hour and about 25.0 mL/hour.

42. The method of claim 41, wherein the rate of prolonged infusion is selected from the group consisting of 0.1, 0.2, 0.3, 0.4, 0.5, 0.6, 0.7, 0.8, 0.9, 1.0, 1.1, 1.2, 1.3, 1.4, 1.5, 1.6, 1.7, 1.8, 1.9, 2.0, 2.1, 2.2, 2.3, 2.4, 2.5, 2.6, 2.7, 2.8, 2.9, 3.0, 3.1, 3.2, 3.3, 3.4, 3.5, 3.6, 3.7, 3.8, 3.9, 4.0, 4.1, 4.2, 4.3, 4.4, 4.5, 4.6, 4.7, 4.8, 4.9, 5.0, 5.1, 5.2, 5.3, 5.4, 5.5, 5.6, 5.7, 5.8, 5.9, 6.0, 6.1, 6.2, 6.3, 6.4, 6.5, 6.6, 6.7, 6.8, 6.9, 7.0, 7.1, 7.2, 7.3, 7.4, 7.5, 7.6, 7.7, 7.8, 7.9, 8.0, 8.1, 8.2, 8.3, 8.4, 8.5, 8.6, 8.7, 8.8, 8.9, 9.0, 9.1, 9.2, 9.3, 9.4, 9.5, 9.6, 9.7, 9.8, 9.9, 10.0, 10.1, 10.2, 10.3, 10.4, 10.5, 10.6, 10.7, 10.8, 10.9, 11.0, 11.1, 11.2, 11.3, 11.4, 11.5, 11.6, 11.7, 11.8, 11.9, 12.0, 12.1, 12.2, 12.3, 12.4, 12.5, 12.6, 12.7, 12.8, 12.9, 13.0, 13.1, 13.2, 13.3, 13.4, 13.5, 13.6, 13.7, 13.8, 13.9, 14.0, 14.1, 14.2, 14.3, 14.4, 14.5, 14.6, 14.7, 14.8, 14.9, 15.0, 15.1, 15.2, 15.3, 15.4, 15.5, 15.6, 15.7, 15.8, 15.9, 16.0, 16.1, 16.2, 16.3, 16.4, 16.5, 16.6, 16.7, 16.8, 16.9, 17.0, 17.1, 17.2, 17.3, 17.4, 17.5, 17.6, 17.7, 17.8, 17.9, 18.0, 18.1, 18.2, 18.3, 18.4, 18.5, 18.6, 18.7, 18.8, 18.9, 19.0, 19.1, 19.2, 19.3, 19.4, 19.5, 19.6, 19.7, 19.8, 19.9, 20.0, 20.1, 20.2, 20.3, 20.4, 20.5, 20.6, 20.7, 20.8, 20.9, 21.0, 21.1, 21.2, 21.3, 21.4, 21.5, 21.6, 21.7, 21.8, 21.9, 22.0, 22.1, 22.2, 22.3, 22.4, 22.5, 22.6, 22.7, 22.8, 22.9, 23.0, 23.1, 23.2, 23.3, 23.4, 23.5, 23.6, 23.7, 23.8, 23.9, 24.0, 24.1, 24.2, 24.3, 24.4, 24.5, 24.6, 24.7, 24.8, 24.9, and 25.0 mL/hour.

43. The method of claim 42, wherein the rate of prolonged infusion is 1.0 mL/hour.

44. The method of claim 42, wherein the rate of prolonged infusion is 1.5 mL/hour.

45. The method of any one of claims 29-40, wherein the rate of prolonged infusion exceeds the rate of cerebrospinal fluid (CSF) absorption.

46. The method of any one of claims 11-28, wherein the IT administration comprises a total dose between about 1×10⁶ VG and about 1×10¹⁶ VG.

47. The method of claim 46, wherein the total dose is selected from the group consisting of about 1×10⁶, 2×10⁶, 3×10⁶, 4×10⁶, 5×10⁶, 6×10⁶, 7×10⁶, 8×10⁶, 9×10⁶, 1×10⁷, 2×10⁷, 3×10⁷, 4×10⁷, 5×10⁷, 6×10⁷, 7×10⁷, 8×10⁷, 9×10⁷, 1×10⁸, 2×10⁸, 3×10⁸, 4×10⁸, 5×10⁸, 6×10⁸, 7×10⁸, 8×10⁸, 9×10⁸, 1×10⁹, 2×10⁹, 3×10⁹, 4×10⁹, 5×10⁹, 6×10⁹, 7×10⁹, 8×10⁹, 9×10⁹, 1×10¹⁰, 2×10¹⁰, 3×10¹⁰, 4×10¹⁰, 5×10¹⁰, 6×10¹⁰, 7×10¹⁰, 8×10¹⁰, 9×10¹⁰, 1×10¹¹, 2×10¹¹, 3×10¹¹, 4×10¹¹, 5×10¹¹, 6×10¹¹, 7×10¹¹, 8×10¹¹, 9×10¹¹, 1×10¹², 2×10¹², 3×10¹², 4×10¹², 5×10¹², 6×10¹², 7×10¹², 8×10¹², 9×10¹², 1×10¹³, 2×10¹³, 3×10¹³, 4×10¹³, 5×10¹³, 6×10¹³, 7×10¹³, 8×10¹³, 9×10¹³, 1×10¹⁴, 2×10¹⁴, 3×10¹⁴, 4×10¹⁴, 5×10¹⁴, 6×10¹⁴, 7×10¹⁴, 8×10¹⁴, 9×10¹⁴, 1×10¹⁵, 2×10¹⁵, 3×10¹⁵, 4×10¹⁵, 5×10¹⁵, 6×10¹⁵, 7×10¹⁵, 8×10¹⁵, 9×10¹⁵, and 1×10¹⁶ VG.

48. The method of any one of claims 11-28, wherein the concentration of the AAV particles in the IT administration is selected from the group consisting of 1×10⁶, 2×10⁶, 3×10⁶, 4×10⁶, 5×10⁶, 6×10⁶, 7×10⁶, 8×10⁶, 9×10⁶, 1×10⁷, 2×10⁷, 3×10⁷, 4×10⁷, 5×10⁷, 6×10⁷, 7×10⁷, 8×10⁷, 9×10⁷, 1×10⁸, 2×10⁸, 3×10⁸, 4×10⁸, 5×10⁸, 6×10⁸, 7×10⁸, 8×10⁸, 9×10⁸, 1×10⁹, 2×10⁹, 3×10⁹, 4×10⁹, 5×10⁹, 6×10⁹, 7×10⁹, 8×10⁹, 9×10⁹, 1×10¹⁰, 2×10¹⁰, 3×10¹⁰, 4×10¹⁰, 5×10¹⁰, 6×10¹⁰, 7×10¹⁰, 8×10¹⁰, 9×10¹⁰, 1×10¹¹, 2×10¹¹, 3×10¹¹, 4×10¹¹, 5×10¹¹, 6×10¹¹, 7×10¹¹, 8×10¹¹, 9×10¹¹, 1×10¹², 2×10¹², 3×10¹², 4×10¹², 5×10¹², 6×10¹², 7×10¹², 8×10¹², 9×10¹², 1×10¹³, 2×10¹³, 3×10¹³, 4×10¹³, 5×10¹³, 6×10¹³, 7×10¹³, 8×10¹³, 9×10¹³, 1×10¹⁴, 2×10¹⁴, 3×10¹⁴, 4×10¹⁴, 5×10¹⁴, 6×10¹⁴, 7×10¹⁴, 8×10¹⁴, 9×10¹⁴, 1×10¹⁵, 2×10¹⁵, 3×10¹⁵, 4×10¹⁵, 5×10¹⁵, 6×10¹⁵, 7×10¹⁵, 8×10¹⁵, 9×10¹⁵, and 1×10¹⁶ VG/mL.

49. The method of any one of claims 11-48, wherein during IT administration the subject is in a position selected from the group consisting of, supine, prone, right lateral recumbent (RLR), left lateral recumbent (LLR), Fowler's, and Trendelenburg.

50. The method of any one of claims 11-48, wherein during IT administration the subject is at an angle between approximately horizontal 00 to about vertical 90° for the duration of the administration.

51. The method of claim 50, wherein the subject is at an angle selected from the group consisting of 0°, 1°, 2°, 3°, 4°, 5°, 6°, 7°, 8°, 9°, 10°, 11°, 12°, 13°, 14°, 15°, 16°, 17°, 18°, 19°, 20°, 21°, 22°, 23°, 24°, 25°, 26°, 27°, 28°, 29°, 30°, 31°, 32°, 33°, 34°, 35°, 36°, 37°, 38°, 39°, 40°, 41°, 42°, 43°, 44°, 45°, 46°, 47°, 48°, 49°, 50°, 51°, 52°, 53°, 54°, 55°, 56°, 57°, 58°, 59°, 60°, 61°, 62°, 63°, 64°, 65°, 66°, 67°, 68°, 69°, 70°, 71°, 72°, 73°, 74° 75°, 76°, 77°, 78°, 79°, 80°, 81°, 82°, 83°, 84°, 85°, 86°, 87°, 88°, 89°, and 90°.

52. The method of any one of claims 11-51, wherein the IT administration is by an infusion pump or device, and wherein said infusion pump or devices uses a catheter.

53. The method of claim 52, wherein the catheter is a single port catheter.

54. The method of claim 52, wherein the catheter is a multi-port catheter.

55. The method of claim 52, wherein the catheter is a flexible catheter.

56. The method of claim 52, wherein the catheter is a rigid catheter.

57. The method of claim 52, wherein the catheter is a retractable catheter.

58. A method of increasing distribution of AAV particles in the CNS of a subject in need thereof comprising administering to said subject an effective amount of said AAV particle comprising a vector genome packaged in a capsid.

59. The method of claim 58, wherein the capsid has a serotype selected from the group consisting of AAVrh.10 (AAVrh10), AAV-DJ (AAVDJ), AAV-DJ8 (AAVDJ8), AAV1, AAV2, AAV2G9, AAV3, AAV3a, AAV3b, AAV3-3, AAV4, AAV4-4, AAV5, AAV6, AAV6.1, AAV6.2, AAV6.1.2, AAV7, AAV7.2, AAV8, AAV9, AAV9.11, AAV9.13, AAV9.16, AAV9.24, AAV9.45, AAV9.47, AAV9.61, AAV9.68, AAV9.84, AAV9.9, AAV10, AAV11, AAV12, AAV16.3, AAV24.1, AAV27.3, AAV42.12, AAV42-1b, AAV42-2, AAV42-3a, AAV42-3b, AAV42-4, AAV42-5a, AAV42-5b, AAV42-6b, AAV42-8, AAV42-10, AAV42-11, AAV42-12, AAV42-13, AAV42-15, AAV42-aa, AAV43-1, AAV43-12, AAV43-20, AAV43-21, AAV43-23, AAV43-25, AAV43-5, AAV44.1, AAV44.2, AAV44.5, AAV223.1, AAV223.2, AAV223.4, AAV223.5, AAV223.6, AAV223.7, AAV1-7/rh.48, AAV1-8/rh.49, AAV2-15/rh.62, AAV2-3/rh.61, AAV2-4/rh.50, AAV2-5/rh.51, AAV3.1/hu.6, AAV3.1/hu.9, AAV3-9/rh.52, AAV3-11/rh.53, AAV4-8/r11.64, AAV4-9/rh.54, AAV4-19/rh.55, AAV5-3/rh.57, AAV5-22/rh.58, AAV7.3/hu.7, AAV16.8/hu.10, AAV16.12/hu.11, AAV29.3/bb.1, AAV29.5/bb.2, AAV106.1/hu.37, AAV114.3/hu.40, AAV127.2/hu.41, AAV127.5/hu.42, AAV128.3/hu.44, AAV130.4/hu.48, AAV145.1/hu.53, AAV145.5/hu.54, AAV145.6/hu.55, AAV161.10/hu.60, AAV161.6/hu.61, AAV33.12/hu.17, AAV33.4/hu.15, AAV33.8/hu.16, AAV52/hu.19, AAV52.1/hu.20, AAV58.2/hu.25, AAVA3.3, AAVA3.4, AAVA3.5, AAVA3.7, AAVC1, AAVC2, AAVC5, AAVF3, AAVF5, AAVH2, AAVrh.72, AAVhu.8, AAVrh.68, AAVrh.70, AAVpi.1, AAVpi.3, AAVpi.2, AAVrh.60, AAVrh.44, AAVrh.65, AAVrh.55, AAVrh.47, AAVrh.69, AAVrh.45, AAVrh.59, AAVhu.12, AAVH6, AAVLK03, AAVH-1/hu.1, AAVH-5/hu.3, AAVLG-10/rh.40, AAVLG-4/rh.38, AAVLG-9/hu.39, AAVN721-8/rh.43, AAVCh.5, AAVCh.5R1, AAVcy.2, AAVcy.3, AAVcy.4, AAVcy.5, AAVCy.5R1, AAVCy.5R2, AAVCy.5R3, AAVCy.5R4, AAVcy.6, AAVhu.1, AAVhu.2, AAVhu.3, AAVhu.4, AAVhu.5, AAVhu.6, AAVhu.7, AAVhu.9, AAVhu.10, AAVhu.11, AAVhu.13, AAVhu.15, AAVhu.16, AAVhu.17, AAVhu.18, AAVhu.20, AAVhu.21, AAVhu.22, AAVhu.23.2, AAVhu.24, AAVhu.25, AAVhu.27, AAVhu.28, AAVhu.29, AAVhu.29R, AAVhu.31, AAVhu.32, AAVhu.34, AAVhu.35, AAVhu.37, AAVhu.39, AAVhu.40, AAVhu.41, AAVhu.42, AAVhu.43, AAVhu.44, AAVhu.44R1, AAVhu.44R2, AAVhu.44R3, AAVhu.45, AAVhu.46, AAVhu.47, AAVhu.48, AAVhu.48R1, AAVhu.48R2, AAVhu.48R3, AAVhu.49, AAVhu.51, AAVhu.52, AAVhu.54, AAVhu.55, AAVhu.56, AAVhu.57, AAVhu.58, AAVhu.60, AAVhu.61, AAVhu.63, AAVhu.64, AAVhu.66, AAVhu.67, AAVhu.14/9, AAVhu.t 19, AAVrh.2, AAVrh.2R, AAVrh.8, AAVrh.8R, AAVrh.12, AAVrh.13, AAVrh.13R, AAVrh.14, AAVrh.17, AAVrh.18, AAVrh.19, AAVrh.20, AAVrh.21, AAVrh.22, AAVrh.23, AAVrh.24, AAVrh.25, AAVrh.31, AAVrh.32, AAVrh.33, AAVrh.34, AAVrh.35, AAVrh.36, AAVrh.37, AAVrh.37R2, AAVrh.38, AAVrh.39, AAVrh.40, AAVrh.46, AAVrh.48, AAVrh.48.1, AAVrh.48.1.2, AAVrh.48.2, AAVrh.49, AAVrh.51, AAVrh.52, AAVrh.53, AAVrh.54, AAVrh.56, AAVrh.57, AAVrh.58, AAVrh.61, AAVrh.64, AAVrh.64R1, AAVrh.64R2, AAVrh.67, AAVrh.73, AAVrh.74, AAVrh8R, AAVrh8R A586R mutant, AAVrh8R R533A mutant, AAAV, BAAV, caprine AAV, bovine AAV, AAVhE1.1, AAVhEr1.5, AAVhER1.14, AAVhEr1.8, AAVhEr1.16, AAVhEr1.18, AAVhEr1.35, AAVhEr1.7, AAVhEr1.36, AAVhEr2.29, AAVhEr2.4, AAVhEr2.16, AAVhEr2.30, AAVhEr2.31, AAVhEr2.36, AAVhER1.23, AAVhEr3.1, AAV2.5T, AAV-PAEC, AAV-LK01, AAV-LK02, AAV-LK03, AAV-LK04, AAV-LK05, AAV-LK06, AAV-LK07, AAV-LK08, AAV-LK09, AAV-LK10, AAV-LK11, AAV-LK12, AAV-LK13, AAV-LK14, AAV-LK15, AAV-LK16, AAV-LK17, AAV-LK18, AAV-LK19, AAV-PAEC2, AAV-PAEC4, AAV-PAEC6, AAV-PAEC7, AAV-PAEC8, AAV-PAEC11, AAV-PAEC12, AAV-2-pre-miRNA-101, AAV-8h, AAV-8b, AAV-h, AAV-b, AAV SM 10-2, AAV Shuffle 100-1, AAV Shuffle 100-3, AAV Shuffle 100-7, AAV Shuffle 10-2, AAV Shuffle 10-6, AAV Shuffle 10-8, AAV Shuffle 100-2, AAV SM 10-1, AAV SM 10-8, AAV SM 100-3, AAV SM 100-10, BNP61 AAV, BNP62 AAV, BNP63 AAV, AAVrh.50, AAVrh.43, AAVrh.62, AAVrh.48, AAVhu.19, AAVhu.11, AAVhu.53, AAV4-8/rh.64, AAVLG-9/hu.39, AAV54.5/hu.23, AAV54.2/hu.22, AAV54.7/hu.24, AAV54.1/hu.21, AAV54.4R/hu.27, AAV46.2/hu.28, AAV46.6/hu.29, AAV128.1/hu.43, true type AAV (ttAAV), UPENN AAV 10 and/or Japanese AAV 10 serotypes, and variants thereof.

60. The method of claim 58, wherein the administration is at least one route selected from the group consisting of intrathecal (IT) administration, intraparenchymal (IPa) administration, and intracerebroventricular (ICV) administration.

61. The method of claim 60, wherein the first route of administration is IT administration.

62. The method of claim 61, wherein IT administration occurs in at least one location in at least one region of the spine of the subject, and wherein the at least one region of the spine of the subject is selected from the group consisting of cervical, thoracic, lumbar and sacral region.

63. The method of claim 61, wherein IT administration occurs in the cervical region, and wherein IT administration to the cervical region occurs in at least one location selected from the group consisting of C1, C2, C3, C4, C5, C6, and C7.

64. The method of claim 61, wherein IT administration occurs in the thoracic region, and wherein IT administration to the thoracic region occurs in at least one location selected from the group consisting of T1, T2, T3, T3, T4, T5, T6, T7, T8, T9, T10, T11, and T12.

65. The method of claim 61, wherein the IT administration occurs in the lumbar region, and wherein IT administration to the lumbar region occurs in at least one location selected from the group consisting of L1, L2, L3, L4, and L5.

66. The method of claim 61, wherein IT administration occurs in the lumbar region, and wherein IT administration to the sacral region occurs in at least one location selected from the group consisting of S1, S2, S3, S4, and S5.

67. The method of any of claims 62-66, wherein IT administration occurs in one location.

68. The method of claim 67, wherein the location is C1.

69. The method of claim 67, wherein the location is C5.

70. The method of claim 67, wherein the location is T1.

71. The method of claim 67, wherein the location is L1.

72. The method of claim 67, wherein the location is L5.

73. The method of any of claims 62-66, wherein IT administration occurs in three locations.

74. The method of claim 73, wherein the locations are L1, T1 and C5.

75. The method of claim 61, wherein the volume of IT administration is less than 1 mL.

76. The method of claim 61, wherein the volume of IT administration is between about 0.1 mL to about 120 mL.

77. The method of any of claims 61-74, wherein the IT administration is via bolus infusion.

78. The method of any of claims 61-74, wherein the IT administration is via prolonged infusion.

79. The method of claim 78, wherein the prolonged infusion occurs at a volume of more than 1 mL.

80. The method of claim 79, wherein the prolonged infusion occurs at a volume of at least 3 mL.

81. The method of claim 79, wherein the prolonged infusion occurs at a volume of 3 mL.

82. The method of claim 79, wherein the prolonged infusion occurs at a volume of at least 10 mL.

83. The method of claim 79, wherein the prolonged infusion occurs at a volume of 10 mL.

84. The method of claim 78, wherein the prolonged infusion occurs for at least a duration selection from the group consisting of 0.17, 0.33, 0.5, 0.67, 0.83, 1, 2, 3, 4, 5, 6, 7, 8, 9, 10, 11, 12, 13, 14, 15, 16, 17, 18, 19, 20, 21, 22, 23, 24, 25, 26, 27, 28, 29, 30, 31, 32, 33, 34, 35, and 36 hour(s).

85. The method of claim 84, wherein the duration is at least one hour.

86. The method of claim 84, wherein the duration is at least 10 hours.

87. The method of claim 78, wherein the prolonged infusion occurs at a constant rate.

88. The method of claim 78, wherein the prolonged infusion occurs at a ramped rate.

89. The method of claim 88, wherein the ramped rate increases over the duration of the prolonged infusion.

90. The method of claim 78, wherein the prolonged infusion occurs at a complex rate alternating between high and low rates over the duration of the prolonged infusion.

91. The method of any one of claims 79-90, wherein the rate of prolonged infusion is between about 0.1 mL/hour and about 25.0 mL/hour.

92. The method of claim 91, wherein the rate of prolonged infusion is selected from the group consisting of 0.1, 0.2, 0.3, 0.4, 0.5, 0.6, 0.7, 0.8, 0.9, 1.0, 1.1, 1.2, 1.3, 1.4, 1.5, 1.6, 1.7, 1.8, 1.9, 2.0, 2.1, 2.2, 2.3, 2.4, 2.5, 2.6, 2.7, 2.8, 2.9, 3.0, 3.1, 3.2, 3.3, 3.4, 3.5, 3.6, 3.7, 3.8, 3.9, 4.0, 4.1, 4.2, 4.3, 4.4, 4.5, 4.6, 4.7, 4.8, 4.9, 5.0, 5.1, 5.2, 5.3, 5.4, 5.5, 5.6, 5.7, 5.8, 5.9, 6.0, 6.1, 6.2, 6.3, 6.4, 6.5, 6.6, 6.7, 6.8, 6.9, 7.0, 7.1, 7.2, 7.3, 7.4, 7.5, 7.6, 7.7, 7.8, 7.9, 8.0, 8.1, 8.2, 8.3, 8.4, 8.5, 8.6, 8.7, 8.8, 8.9, 9.0, 9.1, 9.2, 9.3, 9.4, 9.5, 9.6, 9.7, 9.8, 9.9, 10.0, 10.1, 10.2, 10.3, 10.4, 10.5, 10.6, 10.7, 10.8, 10.9, 11.0, 11.1, 11.2, 11.3, 11.4, 11.5, 11.6, 11.7, 11.8, 11.9, 12.0, 12.1, 12.2, 12.3, 12.4, 12.5, 12.6, 12.7, 12.8, 12.9, 13.0, 13.1, 13.2, 13.3, 13.4, 13.5, 13.6, 13.7, 13.8, 13.9, 14.0, 14.1, 14.2, 14.3, 14.4, 14.5, 14.6, 14.7, 14.8, 14.9, 15.0, 15.1, 15.2, 15.3, 15.4, 15.5, 15.6, 15.7, 15.8, 15.9, 16.0, 16.1, 16.2, 16.3, 16.4, 16.5, 16.6, 16.7, 16.8, 16.9, 17.0, 17.1, 17.2, 17.3, 17.4, 17.5, 17.6, 17.7, 17.8, 17.9, 18.0, 18.1, 18.2, 18.3, 18.4, 18.5, 18.6, 18.7, 18.8, 18.9, 19.0, 19.1, 19.2, 19.3, 19.4, 19.5, 19.6, 19.7, 19.8, 19.9, 20.0, 20.1, 20.2, 20.3, 20.4, 20.5, 20.6, 20.7, 20.8, 20.9, 21.0, 21.1, 21.2, 21.3, 21.4, 21.5, 21.6, 21.7, 21.8, 21.9, 22.0, 22.1, 22.2, 22.3, 22.4, 22.5, 22.6, 22.7, 22.8, 22.9, 23.0, 23.1, 23.2, 23.3, 23.4, 23.5, 23.6, 23.7, 23.8, 23.9, 24.0, 24.1, 24.2, 24.3, 24.4, 24.5, 24.6, 24.7, 24.8, 24.9, and 25.0 mL/hour.

93. The method of claim 92, wherein the rate of prolonged infusion is 1.0 mL/hour.

94. The method of claim 92, wherein the rate of prolonged infusion is 1.5 mL/hour.

95. The method of any one of claims 79-90, wherein the rate of prolonged infusion exceeds the rate of cerebrospinal fluid (CSF) absorption.

96. The method of claim 61, wherein the second route of administration is ICV administration.

97. The method of claim 96, wherein ICV administration is via prolonged infusion to the ventricular system in at least one location selected from the group consisting of right lateral ventricle, left lateral ventricle, third ventricle, and fourth ventricle.

98. The method of claim 96, wherein ICV administration is via prolonged infusion to the ventricular system in at least one location selected from the group consisting of interventricular foramina (also called foramina of Monro), cerebral aqueduct, and central canal.

99. The method of claim 96, wherein ICV administration is via prolonged infusion to the ventricular system in at least one location selected from the group consisting of median aperture, right lateral aperture, and left lateral aperture.

100. The method of claim 96, wherein ICV administration is via prolonged infusion to the ventricular system in the perivascular space in the brain.

101. The method of any one of claims 60-101, wherein the administration comprises a total dose between about 1×10⁶ VG and about 1×10¹⁶ VG.

102. The method of claim 101, wherein the total dose is selected from the group consisting of about 1×10⁶, 2×10⁶, 3×10⁶, 4×10⁶, 5×10⁶, 6×10⁶, 7×10⁶, 8×10⁶, 9×10⁶, 1×10⁷, 2×10⁷, 3×10⁷, 4×10⁷, 5×10⁷, 6×10⁷, 7×10⁷, 8×10⁷, 9×10⁷, 1×10⁸, 2×10⁸, 3×10⁸, 4×10⁸, 5×10⁸, 6×10⁸, 7×10⁸, 8×10⁸, 9×10⁸, 1×10⁹, 2×10⁹, 3×10⁹, 4×10⁹, 5×10⁹, 6×10⁹, 7×10⁹, 8×10⁹, 9×10⁹, 1×10¹⁰, 2×10¹⁰, 3×10¹⁰, 4×10¹⁰, 5×10¹⁰, 6×10¹⁰, 7×10¹⁰, 8×10¹⁰, 9×10¹⁰, 1×10¹¹, 2×10¹¹, 3×10¹¹, 4×10¹¹, 5×10¹¹, 6×10¹¹, 7×10¹¹, 8×10¹¹, 9×10¹¹, 1×10¹², 2×10¹², 3×10¹², 4×10¹², 5×10¹², 6×10¹², 7×10¹², 8×10¹², 9×10¹², 1×10¹³, 2×10¹³, 3×10¹³, 4×10¹³, 5×10¹³, 6×10¹³, 7×10¹³, 8×10¹³, 9×10¹³, 1×10¹⁴, 2×10¹⁴, 3×10¹⁴, 4×10¹⁴, 5×10¹⁴, 6×10¹⁴, 7×10¹⁴, 8×10¹⁴, 9×10¹⁴, 1×10¹⁵, 2×10¹⁵, 3×10¹⁵, 4×10¹⁵, 5×10¹⁵, 6×10¹⁵, 7×10¹⁵, 8×10¹⁵, 9×10¹⁵, and 1×10¹⁶ VG.

103. The method of any one of claims 60-101, wherein the concentration of the AAV particles in the administration is selected from the group consisting of 1×10⁶, 2×10⁶, 3×10⁶, 4×10⁶, 5×10⁶, 6×10⁶, 7×10⁶, 8×10⁶, 9×10⁶, 1×10⁷, 2×10⁷, 3×10⁷, 4×10⁷, 5×10⁷, 6×10⁷, 7×10⁷, 8×10⁷, 9×10⁷, 1×10⁸, 2×10⁸, 3×10⁸, 4×10⁸, 5×10⁸, 6×10⁸, 7×10⁸, 8×10⁸, 9×10⁸, 1×10⁹, 2×10⁹, 3×10⁹, 4×10⁹, 5×10⁹, 6×10⁹, 7×10⁹, 8×10⁹, 9×10⁹, 1×10¹⁰, 2×10¹⁰, 3×10¹⁰, 4×10¹⁰, 5×10¹⁰, 6×10¹⁰, 7×10¹⁰, 8×10¹⁰, 9×10¹⁰, 1×10¹¹, 2×10¹¹, 3×10¹¹, 4×10¹¹, 5×10¹¹, 6×10¹¹, 7×10¹¹, 8×10¹¹, 9×10¹¹, 1×10¹², 2×10¹², 3×10¹², 4×10¹², 5×10¹², 6×10¹², 7×10¹², 8×10¹², 9×10¹², 1×10¹³, 2×10¹³, 3×10¹³, 4×10¹³, 5×10¹³, 6×10¹³, 7×10¹³, 8×10¹³, 9×10¹³, 1×10¹⁴, 2×10¹⁴, 3×10¹⁴, 4×10¹⁴, 5×10¹⁴, 6×10¹⁴, 7×10¹⁴, 8×10¹⁴, 9×10¹⁴, 1×10¹⁵, 2×10¹⁵, 3×10¹⁵, 4×10¹⁵, 5×10¹⁵, 6×10¹⁵, 7×10¹⁵, 8×10¹⁵, 9×10¹⁵, and 1×10¹⁶ VG/mL.

104. The method of any one of claims 60-103, wherein the IT administration is by an infusion pump or device, and wherein said infusion pump or devices uses a catheter.

105. The method of claim 104, wherein the catheter is a single port catheter.

106. The method of claim 104, wherein the catheter is a multi-port catheter.

107. The method of claim 104, wherein the catheter is a flexible catheter.

108. The method of claim 104, wherein the catheter is a rigid catheter.

109. The method of claim 104, wherein the catheter is a retractable catheter.

110. The method of any one of claims 60, and 96-109, wherein a device selected from the group consisting of a head trajectory guide, head trajectory frame, and a skull frame is used for ICV administration.

111. The method of claim 110, wherein neuronavigational software is used for ICV administration.

112. The method of any one of claims 58-111, wherein the distribution is increased by a percentage selected from the group consisting of 1%, 2%, 3%, 4%, 5%, 6%, 7%, 8%, 9%, 10%, 11%, 12%, 13%, 14%, 15%, 16%, 17%, 18%, 19%, 20%, 21%, 22%, 23%, 24%, 25%, 26%, 27%, 28%, 29%, 30%, 31%, 32%, 33%, 34%, 35%, 36%, 37%, 38%, 39%, 40%, 41%, 42%, 43%, 44%, 45%, 46%, 47%, 48%, 49%, 50%, 51%, 52%, 53%, 54%, 55%, 60%, 65%, 70%, 75%, 80%, 85%, 90%, 95% or more than 95%.

113. An AAV particle comprising a vector genome packaged in a capsid, said capsid having a serotype selected from the group consisting of AAVrh.10 (AAVrh10), AAV-DJ (AAVDJ), AAV-DJ8 (AAVDJ8), AAV1, AAV2, AAV2G9, AAV3, AAV3a, AAV3b, AAV3-3, AAV4, AAV4-4, AAV5, AAV6, AAV6.1, AAV6.2, AAV6.1.2, AAV7, AAV7.2, AAV8, AAV9, AAV9.11, AAV9.13, AAV9.16, AAV9.24, AAV9.45, AAV9.47, AAV9.61, AAV9.68, AAV9.84, AAV9.9, AAV10, AAV11, AAV12, AAV16.3, AAV24.1, AAV27.3, AAV42.12, AAV42-1b, AAV42-2, AAV42-3a, AAV42-3b, AAV42-4, AAV42-5a, AAV42-5b, AAV42-6b, AAV42-8, AAV42-10, AAV42-11, AAV42-12, AAV42-13, AAV42-15, AAV42-aa, AAV43-1, AAV43-12, AAV43-20, AAV43-21, AAV43-23, AAV43-25, AAV43-5, AAV44.1, AAV44.2, AAV44.5, AAV223.1, AAV223.2, AAV223.4, AAV223.5, AAV223.6, AAV223.7, AAV1-7/rh.48, AAV1-8/rh.49, AAV2-15/rh.62, AAV2-3/rh.61, AAV2-4/rh.50, AAV2-5/rh.51, AAV3.1/hu.6, AAV3.1/hu.9, AAV3-9/rh.52, AAV3-11/rh.53, AAV4-8/r11.64, AAV4-9/rh.54, AAV4-19/rh.55, AAV5-3/rh.57, AAV5-22/rh.58, AAV7.3/hu.7, AAV16.8/hu.10, AAV16.12/hu.11, AAV29.3/bb.1, AAV29.5/bb.2, AAV106.1/hu.37, AAV114.3/hu.40, AAV127.2/hu.41, AAV127.5/hu.42, AAV128.3/hu.44, AAV130.4/hu.48, AAV145.1/hu.53, AAV145.5/hu.54, AAV145.6/hu.55, AAV161.10/hu.60, AAV161.6/hu.61, AAV33.12/hu.17, AAV33.4/hu.15, AAV33.8/hu.16, AAV52/hu.19, AAV52.1/hu.20, AAV58.2/hu.25, AAVA3.3, AAVA3.4, AAVA3.5, AAVA3.7, AAVC1, AAVC2, AAVC5, AAVF3, AAVF5, AAVH2, AAVrh.72, AAVhu.8, AAVrh.68, AAVrh.70, AAVpi.1, AAVpi.3, AAVpi.2, AAVrh.60, AAVrh.44, AAVrh.65, AAVrh.55, AAVrh.47, AAVrh.69, AAVrh.45, AAVrh.59, AAVhu.12, AAVH6, AAVLK03, AAVH-1/hu.1, AAVH-5/hu.3, AAVLG-10/rh.40, AAVLG-4/rh.38, AAVLG-9/hu.39, AAVN721-8/rh.43, AAVCh.5, AAVCh.5R1, AAVcy.2, AAVcy.3, AAVcy.4, AAVcy.5, AAVCy.5R1, AAVCy.5R2, AAVCy.5R3, AAVCy.5R4, AAVcy.6, AAVhu.1, AAVhu.2, AAVhu.3, AAVhu.4, AAVhu.5, AAVhu.6, AAVhu.7, AAVhu.9, AAVhu.10, AAVhu.11, AAVhu.13, AAVhu.15, AAVhu.16, AAVhu.17, AAVhu.18, AAVhu.20, AAVhu.21, AAVhu.22, AAVhu.23.2, AAVhu.24, AAVhu.25, AAVhu.27, AAVhu.28, AAVhu.29, AAVhu.29R, AAVhu.31, AAVhu.32, AAVhu.34, AAVhu.35, AAVhu.37, AAVhu.39, AAVhu.40, AAVhu.41, AAVhu.42, AAVhu.43, AAVhu.44, AAVhu.44R1, AAVhu.44R2, AAVhu.44R3, AAVhu.45, AAVhu.46, AAVhu.47, AAVhu.48, AAVhu.48R1, AAVhu.48R2, AAVhu.48R3, AAVhu.49, AAVhu.51, AAVhu.52, AAVhu.54, AAVhu.55, AAVhu.56, AAVhu.57, AAVhu.58, AAVhu.60, AAVhu.61, AAVhu.63, AAVhu.64, AAVhu.66, AAVhu.67, AAVhu.14/9, AAVhu.t 19, AAVrh.2, AAVrh.2R, AAVrh.8, AAVrh.8R, AAVrh.12, AAVrh.13, AAVrh.13R, AAVrh.14, AAVrh.17, AAVrh.18, AAVrh.19, AAVrh.20, AAVrh.21, AAVrh.22, AAVrh.23, AAVrh.24, AAVrh.25, AAVrh.31, AAVrh.32, AAVrh.33, AAVrh.34, AAVrh.35, AAVrh.36, AAVrh.37, AAVrh.37R2, AAVrh.38, AAVrh.39, AAVrh.40, AAVrh.46, AAVrh.48, AAVrh.48.1, AAVrh.48.1.2, AAVrh.48.2, AAVrh.49, AAVrh.51, AAVrh.52, AAVrh.53, AAVrh.54, AAVrh.56, AAVrh.57, AAVrh.58, AAVrh.61, AAVrh.64, AAVrh.64R1, AAVrh.64R2, AAVrh.67, AAVrh.73, AAVrh.74, AAVrh8R, AAVrh8R A586R mutant, AAVrh8R R533A mutant, AAAV, BAAV, caprine AAV, bovine AAV, AAVhE1.1, AAVhEr1.5, AAVhER1.14, AAVhEr1.8, AAVhEr1.16, AAVhEr1.18, AAVhEr1.35, AAVhEr1.7, AAVhEr1.36, AAVhEr2.29, AAVhEr2.4, AAVhEr2.16, AAVhEr2.30, AAVhEr2.31, AAVhEr2.36, AAVhER1.23, AAVhEr3.1, AAV2.5T, AAV-PAEC, AAV-LK01, AAV-LK02, AAV-LK03, AAV-LK04, AAV-LK05, AAV-LK06, AAV-LK07, AAV-LK08, AAV-LK09, AAV-LK10, AAV-LK11, AAV-LK12, AAV-LK13, AAV-LK14, AAV-LK15, AAV-LK16, AAV-LK17, AAV-LK18, AAV-LK19, AAV-PAEC2, AAV-PAEC4, AAV-PAEC6, AAV-PAEC7, AAV-PAEC8, AAV-PAEC11, AAV-PAEC12, AAV-2-pre-miRNA-101, AAV-8h, AAV-8b, AAV-h, AAV-b, AAV SM 10-2, AAV Shuffle 100-1, AAV Shuffle 100-3, AAV Shuffle 100-7, AAV Shuffle 10-2, AAV Shuffle 10-6, AAV Shuffle 10-8, AAV Shuffle 100-2, AAV SM 10-1, AAV SM 10-8, AAV SM 100-3, AAV SM 100-10, BNP61 AAV, BNP62 AAV, BNP63 AAV, AAVrh.50, AAVrh.43, AAVrh.62, AAVrh.48, AAVhu.19, AAVhu.11, AAVhu.53, AAV4-8/rh.64, AAVLG-9/hu.39, AAV54.5/hu.23, AAV54.2/hu.22, AAV54.7/hu.24, AAV54.1/hu.21, AAV54.4R/hu.27, AAV46.2/hu.28, AAV46.6/hu.29, AAV128.1/hu.43, true type AAV (ttAAV), UPENN AAV 10 and/or Japanese AAV 10 serotypes, and variants thereof.

114. The AAV particle of claim 113, wherein the capsid is AAVrh10.

115. The AAV particle of claim 113, wherein the capsid is AAV-DJ.

116. The AAV particle of claim 113, wherein the capsid is AAV-DJ8.

117. The AAV particle of claim 113, wherein the vector genome comprises a promoter, and wherein said promoter is selected from the group consisting of CBA, CMV, PGK, FXN, H1, and fragments or variants thereof.

118. The AAV particle of claim 117, wherein the promoter is CBA.

119. The AAV particle of claim 117, wherein the promoter is CMV.

120. The AAV particle of claim 117, wherein the promoter is FXN.

121. The AAV particle of claim 117, wherein the promoter is H1.

The application's sequence listing, which the Patent Office published only in electronic form, follows.

SEQUENCE LISTING (663 sequences)

SEQ ID NO: 1 - DNA, 2211 bp, Adeno-associated virus 1
atggctgccgatggttatcttccagattggctcgaggacaacctctctgagggcattcgcgagtggtgggacttgaaacctggagccccgaagcccaaagccaaccagcaaaagcaggacgacggccggggtctggtgcttcctggctacaagtacctcggacccttcaacggactcgacaagggggagcccgtcaacgcggcggacgcagcggccctcgagcacgacaaggcctacgaccagcagctcaaagcgggtgacaatccgtacctgcggtataaccacgccgacgccgagtttcaggagcgtctgcaagaagatacgtcttttgggggcaacctcgggcgagcagtcttccaggccaagaagcgggttctcgaacctctcggtctggttgaggaaggcgctaagacggctcctggaaagaaacgtccggtagagcagtcgccacaagagccagactcctcctcgggcatcggcaagacaggccagcagcccgctaaaaagagactcaattttggtcagactggcgactcagagtcagtccccgatccacaacctctcggagaacctccagcaacccccgctgctgtgggacctactacaatggcttcaggcggtggcgcaccaatggcagacaataacgaaggcgccgacggagtgggtaatgcctcaggaaattggcattgcgattccacatggctgggcgacagagtcatcaccaccagcacccgcacctgggccttgcccacctacaataaccacctctacaagcaaatctccagtgcttcaacgggggccagcaacgacaaccactacttcggctacagcaccccctgggggtattttgatttcaacagattccactgccacttttcaccacgtgactggcagcgactcatcaacaacaattggggattccggcccaagagactcaacttcaaactcttcaacatccaagtcaaggaggtcacgacgaatgatggcgtcacaaccatcgctaataaccttaccagcacggttcaagtcttctcggactcggagtaccagcttccgtacgtcctcggctctgcgcaccagggctgcctccctccgttcccggcggacgtgttcatgattccgcaatacggctacctgacgctcaacaatggcagccaagccgtgggacgttcatccttttactgcctggaatatttcccttctcagatgctgagaacgggcaacaactttaccttcagctacacctttgaggaagtgcctttccacagcagctacgcgcacagccagagcctggaccggctgatgaatcctctcatcgaccaatacctgtattacctgaacagaactcaaaatcagtccggaagtgcccaaaacaaggacttgctgtttagccgtgggtctccagctggcatgtctgttcagcccaaaaactggctacctggaccctgttatcggcagcagcgcgtttctaaaacaaaaacagacaacaacaacagcaattttacctggactggtgcttcaaaatataacctcaatgggcgtgaatccatcatcaaccctggcactgctatggcctcacacaaagacgacgaagacaagttctttcccatgagcggtgtcatgatttttggaaaagagagcgccggagcttcaaacactgcattggacaatgtcatgattacagacgaagaggaaattaaagccactaaccctgtggccaccgaaagatttgggaccgtggcagtcaatttccagagcagcagcacagaccctgcgaccggagatgtgcatgctatgggagcattacctggcatggtgtggcaagatagagacgtgtacctgcagggtcccatttgggccaaaattcctcacacagatggacactttcacccgtctcctcttatgggcggctttggactcaagaacccgcctcctcagatcctcatcaaaaacacgcctgttcctgcgaatcctccggcggagttttcagctacaaagtttgcttcattcatcacccaatactccacaggacaagtgagtgtggaaattgaatgggagctgcagaaagaaaacagcaagcgctggaatcccgaagtgcagtacacatccaattatgcaaaatctgccaacgttgattttactgtggacaacaatggactttatactgagcctcgccccattggcacccgttaccttacccgtcccctgtaa

SEQ ID NO: 2 - protein, 736 aa, Adeno-associated virus 1
MAADGYLPDWLEDNLSEGIREWWDLKPGAPKPKANQQKQDDGRGLVLPGYKYLGPFNGLDKGEPVNAADAAALEHDKAYDQQLKAGDNPYLRYNHADAEFQERLQEDTSFGGNLGRAVFQAKKRVLEPLGLVEEGAKTAPGKKRPVEQSPQEPDSSSGIGKTGQQPAKKRLNFGQTGDSESVPDPQPLGEPPATPAAVGPTTMASGGGAPMADNNEGADGVGNASGNWHCDSTWLGDRVITTSTRTWALPTYNNHLYKQISSASTGASNDNHYFGYSTPWGYFDFNRFHCHFSPRDWQRLINNNWGFRPKRLNFKLFNIQVKEVTTNDGVTTIANNLTSTVQVFSDSEYQLPYVLGSAHQGCLPPFPADVFMIPQYGYLTLNNGSQAVGRSSFYCLEYFPSQMLRTGNNFTFSYTFEEVPFHSSYAHSQSLDRLMNPLIDQYLYYLNRTQNQSGSAQNKDLLFSRGSPAGMSVQPKNWLPGPCYRQQRVSKTKTDNNNSNFTWTGASKYNLNGRESIINPGTAMASHKDDEDKFFPMSGVMIFGKESAGASNTALDNVMITDEEEIKATNPVATERFGTVAVNFQSSSTDPATGDVHAMGALPGMVWQDRDVYLQGPIWAKIPHTDGHFHPSPLMGGFGLKNPPPQILIKNTPVPANPPAEFSATKFASFITQYSTGQVSVEIEWELQKENSKRWNPEVQYTSNYAKSANVDFTVDNNGLYTEPRPIGTRYLTRPL

SEQ ID NO: 3 - DNA, 4718 bp, Adeno-associated virus 1
ttgcccactccctctctgcgcgctcgctcgctcggtggggcctgcggaccaaaggtccgcagacggcagagctctgctctgccggccccaccgagcgagcgagcgcgcagagagggagtgggcaactccatcactaggggtaatcgcgaagcgcctcccacgctgccgcgtcagcgctgacgtaaattacgtcataggggagtggtcctgtattagctgtcacgtgagtgcttttgcgacattttgcgacaccacgtggccatttagggtatatatggccgagtgagcgagcaggatctccattttgaccgcgaaatttgaacgagcagcagccatgccgggcttctacgagatcgtgatcaaggtgccgagcgacctggacgagcacctgccgggcatttctgactcgtttgtgagctgggtggccgagaaggaatgggagctgcccccggattctgacatggatctgaatctgattgagcaggcacccctgaccgtggccgagaagctgcagcgcgacttcctggtccaatggcgccgcgtgagtaaggccccggaggccctcttctttgttcagttcgagaagggcgagtcctacttccacctccatattctggtggagaccacgggggtcaaatccatggtgctgggccgcttcctgagtcagattagggacaagctggtgcagaccatctaccgcgggatcgagccgaccctgcccaactggttcgcggtgaccaagacgcgtaatggcgccggaggggggaacaaggtggtggacgagtgctacatccccaactacctcctgcccaagactcagcccgagctgcagtgggcgtggactaacatggaggagtatataagcgcctgtttgaacctggccgagcgcaaacggctcgtggcgcagcacctgacccacgtcagccagacccaggagcagaacaaggagaatctgaaccccaattctgacgcgcctgtcatccggtcaaaaacctccgcgcgctacatggagctggtcgggtggctggtggaccggggcatcacctccgagaagcagtggatccaggaggaccaggcctcgtacatctccttcaacgccgcttccaactcgcggtcccagatcaaggccgctctggacaatgccggcaagatcatggcgctgaccaaatccgcgcccgactacctggtaggccccgctccgcccgcggacattaaaaccaaccgcatctaccgcatcctggagctgaacggctacgaacctgcctacgccggctccgtctttctcggctgggcccagaaaaggttcgggaagcgcaacaccatctggctgtttgggccggccaccacgggcaagaccaacatcgcggaagccatcgcccacgccgtgcccttctacggctgcgtcaactggaccaatgagaactttcccttcaatgattgcgtcgacaagatggtgatctggtgggaggagggcaagatgacggccaaggtcgtggagtccgccaaggccattctcggcggcagcaaggtgcgcgtggaccaaaagtgcaagtcgtccgcccagatcgaccccacccccgtgatcgtcacctccaacaccaacatgtgcgccgtgattgacgggaacagcaccaccttcgagcaccagcagccgttgcaggaccggatgttcaaatttgaactcacccgccgtctggagcatgactttggcaaggtgacaaagcaggaagtcaaagagttcttccgctgggcgcaggatcacgtgaccgaggtggcgcatgagttctacgtcagaaagggtggagccaacaaaagacccgcccccgatgacgcggataaaagcgagcccaagcgggcctgcccctcagtcgcggatccatcgacgtcagacgcggaaggagctccggtggactttgccgacaggtaccaaaacaaatgttctcgtcacgcgggcatgcttcagatgctgtttccctgcaagacatgcgagagaatgaatcagaatttcaacatttgcttcacgcacgggacgagagactgttcagagtgcttccccggcgtgtcagaatctcaaccggtcgtcagaaagaggacgtatcggaaactctgtgccattcatcatctgctggggcgggctcccgagattgcttgctcggcctgcgatctggtcaacgtggacctggatgactgtgtttctgagcaataaatgacttaaaccaggtatggctgccgatggttatcttccagattggctcgaggacaacctctctgagggcattcgcgagtggtgggacttgaaacctggagccccgaagcccaaagccaaccagcaaaagcaggacgacggccggggtctggtgcttcctggctacaagtacctcggacccttcaacggactcgacaagggggagcccgtcaacgcggcggacgcagcggccctcgagcacgacaaggcctacgaccagcagctcaaagcgggtgacaatccgtacctgcggtataaccacgccgacgccgagtttcaggagcgtctgcaagaagatacgtcttttgggggcaacctcgggcgagcagtcttccaggccaagaagcgggttctcgaacctctcggtctggttgaggaaggcgctaagacggctcctggaaagaaacgtccggtagagcagtcgccacaagagccagactcctcctcgggcatcggcaagacaggccagcagcccgctaaaaagagactcaattttggtcagactggcgactcagagtcagtccccgatccacaacctctcggagaacctccagcaacccccgctgctgtgggacctactacaatggcttcaggcggtggcgcaccaatggcagacaataacgaaggcgccgacggagtgggtaatgcctcaggaaattggcattgcgattccacatggctgggcgacagagtcatcaccaccagcacccgcacctgggccttgcccacctacaataaccacctctacaagcaaatctccagtgcttcaacgggggccagcaacgacaaccactacttcggctacagcaccccctgggggtattttgatttcaacagattccactgccacttttcaccacgtgactggcagcgactcatcaacaacaattggggattccggcccaagagactcaacttcaaactcttcaacatccaagtcaaggaggtcacgacgaatgatggcgtcacaaccatcgctaataaccttaccagcacggttcaagtcttctcggactcggagtaccagcttccgtacgtcctcggctctgcgcaccagggctgcctccctccgttcccggcggacgtgttcatgattccgcaatacggctacctgacgctcaacaatggcagccaagccgtgggacgttcatccttttactgcctggaatatttcccttctcagatgctgagaacgggcaacaactttaccttcagctacacctttgaggaagtgcctttccacagcagctacgcgcacagccagagcctggaccggctgatgaatcctctcatcgaccaatacctgtattacctgaacagaactcaaaatcagtccggaagtgcccaaaacaaggacttgctgtttagccgtgggtctccagctggcatgtctgttcagcccaaaaactggctacctggaccctgttatcggcagcagcgcgtttctaaaacaaaaacagacaacaacaacagcaattttacctggactggtgcttcaaaatataacctcaatgggcgtgaatccatcatcaaccctggcactgctatggcctcacacaaagacgacgaagacaagttctttcccatgagcggtgtcatgatttttggaaaagagagcgccggagcttcaaacactgcattggacaatgtcatgattacagacgaagaggaaattaaagccactaaccctgtggccaccgaaagatttgggaccgtggcagtcaatttccagagcagcagcacagaccctgcgaccggagatgtgcatgctatgggagcattacctggcatggtgtggcaagatagagacgtgtacctgcagggtcccatttgggccaaaattcctcacacagatggacactttcacccgtctcctcttatgggcggctttggactcaagaacccgcctcctcagatcctcatcaaaaacacgcctgttcctgcgaatcctccggcggagttttcagctacaaagtttgcttcattcatcacccaatactccacaggacaagtgagtgtggaaattgaatgggagctgcagaaagaaaacagcaagcgctggaatcccgaagtgcagtacacatccaattatgcaaaatctgccaacgttgattttactgtggacaacaatggactttatactgagcctcgccccattggcacccgttaccttacccgtcccctgtaattacgtgttaatcaataaaccggttgattcgtttcagttgaactttggtctcctgtccttcttatcttatcggttaccatggttatagcttacacattaactgcttggttgcgcttcgcgataaaagacttacgtcatcgggttacccctagtgatggagttgcccactccctctctgcgcgctcgctcgctcggtggggcctgcggaccaaaggtccgcagacggcagagctctgctctgccggccccaccgagcgagcgagcgcgcagagagggagtgggcaa

SEQ ID NO: 4 - DNA, 3131 bp, Adeno-associated virus
gcggccgcgaattcgcccttggctgcgtcaactggaccaatgagaactttcccttcaatgattgcgtcgacaagatggtgatctggtgggaggagggcaagatgacggccaaggtcgtggagtccgccaaggccattctcggcggcagcaaggtgcgcgtggaccaaaagtgcaagtcgtccgcccagatcgaccccacccccgtgatcgtcacctccaacaccaacatgtgcgccgtgattgacgggaacagcaccaccttcgagcaccagcagcctctccaggaccggatgtttaagttcgaactcacccgccgtctggagcacgactttggcaaggtgacaaagcaggaagtcaaagagttcttccgctgggccagtgatcacgtgaccgaggtggcgcatgagttttacgtcagaaagggcggagccagcaaaagacccgcccccgatgacgcggataaaagcgagcccaagcgggcctgcccctcagtcgcggatccatcgacgtcagacgcggaaggagctccggtggactttgccgacaggtaccaaaacaaatgttctcgtcacgcgggcatgcttcagatgctgtttccctgcaaaacgtgcgagagaatgaatcggaatttcaacatttgcttcacacacggggtcagagactgctcagagtgtttccccggcgtgtcagaatctcaaccggtcgtcagaaagaggacgtatcggaaactccgtgcgattcatcatctgctggggcgggctcccgagattgcttgctcggcctgcgatctggtcaacgtggacctggatgactgtgtttctgagcaataaatgacttaaaccaggtatggctgccgatggttatcttccagattggctcgaggacaacctctctgagggcattcgcgagtggtgggcgctgaaacctggagccccgaagcccaaagccaaccagcaaaagcaggacgacggccggggtctggtgcttcctggctacaagtacctcggacccttcaacggactcgacaagggggagcccgtcaacgcggcggacgcagcggccctcgagcacgacaaggcttacgaccagcagctgcaggcgggtgacaatccgtacctgcggtataaccacgccgacgccgagtttcaggagcgtctgcaagaagatacgtcttttgggggcaacctcgggcgagcagtcttccaggccaagaagcgggttctcgaacctctcggtctggttgaggaaggcgctaagacggctcctggaaagaagagaccggtagagccatcaccccagcgttctccagactcctctacgggcatcggcaagaaaggccaacagcccgccagaaaaagactcaattttggtcagactggcgactcagagtcagttccagaccctcaacctctcggagaacctccagcagcgccctctggtgtgggacctaatacaatggctgcaggcggtggcgcaccaatggcagacaataacgaaggcgccgacggagtgggtagttcctcgggaaattggcattgcgattccacatggctgggcgacagagtcatcaccaccagcacccgaacctgggccctgcccacctacaacaaccacctctacaagcaaatctccaacgggacatcgggaggagccaccaacgacaacacctacttcggctacagcaccccctgggggtattttgactttaacagattccactgccacctttcaccacgtgactggcagcgactcatcaacaacaactggggattccgacccaagagactcagcttcaagctcttcaacatccaggtcaaggaggtcacgcagaatgaaggcaccaagaccatcgccaataacctcaccagcaccatccaggtgtttacggactcggagtaccagctgccgtacgttctcggctctgtccaccagggctgcctgcctccgttcccggcggacgtgttcatgattccccagtacggctacctaacactcaacaacggtagtcaggccgtgggacgctcctccttctactgcctggaatactttccttcgcagatgctgagaaccggcaacaacttccagtttacttacaccttcgaggacgtgcctttccacagcagctacgcccacagctagagcttggaccggctgatgaatcctctgattgaccagtacctgtactacttgtctcggactcaaacaacaggaggcacggcaaatacgcagactctgggcttcagccaaggtgggcctaatacaatggccaatcaggcaaagaactggctgccaggaccctgttaccgccaacaacgcgtctcaacgacaaccgggcaaaacaacaatagcaactttgcctggactgctgggaccaaataccatctgaatggaagaaattcattggctaatcctggcatcgctatggcaacacacaaagacgacgaggagcgtttttttcccagtaacgggatcctgatttttggcaaacaaaatgctgccagagacaatgcggattacagcgatgtcatgctcaccagcgaggaagaaatcaaaaccactaaccctgtggctacagaggaatacggtatcgtggcagataacttgcagcagcaaaacacggctcctcaaattggaactgtcaacagccagggggccttacccggtatggtctggcagaaccgggacgtgtacctgcagggtcccatctgggccaagattcctcacacggacggcaacttccacccgtctccgctgatgggcggctttggcctgaaacatcctccgcctcagatcctgatcaagaacacgcctgtacctgcggatcctccgaccaccttcaaccagtcaaagctgaactctttcatcacgcaatacagcaccggacaggtcagcgtggaaattgaatgggagctgcagaaggaaaacagcaagcgctggaaccccgagatccagtacacctccaactactacaaatctataagtgtggactttgctgttaatacagaaggcgtgtactctgaaccccgccccattggcacccgttacctcacccgtaatctgtaattgcctgttaatcaataaaccggttgattcgtttcagttgaactttggtctctgcgaagggcgaattc

SEQ ID NO: 5 - DNA, 255 bp, Adeno-associated virus 10
ggtaattcctccggaaattggcattgcgattccacatggctgggcgacagagtcatcaccaccagcacccgaacctgggtcctgcccacctacaacaaccacatctacaagcaaatctccagcgagacaggagccaccaacgacaaccactacttcggctacagcaccccctgggggtattttgactttaacagattccactgccacttttcaccacgtgactggcagcgactcatcaacaacaactggggattc

SEQ ID NO: 6 - protein, 738 aa, Adeno-associated virus 10
MAADGYLPDWLEDNLSEGIREWWDLKPGAPKPKANQQKQDDGRGLVLPGYKYLGPFNGLDKGEPVNAADAAALEHDKAYDQQLKAGDNPYLRYNHADAEFQERLQEDTSFGGNLGRAVFQAKKRVLEPLGLVEEAAKTAPGKKRPVEPSPQRSPDSSTGIGKKGQQPAKKRLNFGQTGESESVPDPQPIGEPPAGPSGLGSGTMAAGGGAPMADNNEGADGVGSSSGNWHCDSTWLGDRVITTSTRTWALPTYNNHLYKQISNGTSGGSTNDNTYFGYSTPWGYFDFNRFHCHFSPRDWQRLINNNWGFRPKRLSFKLFNIQVKEVTQNEGTKTIANNLTSTIQVFTDSEYQLPYVLGSAHQGCLPPFPADVFMIPQYGYLTLNNGSQAVGRSSFYCLEYFPSQMLRTGNNFEFSYTFEDVPFHSSYAHSQSLDRLMNPLIDQYLYYLSRTQSTGGTQGTQQLLFSQAGPANMSAQAKNWLPGPCYRQQRVSTTLSQNNNSNFAWTGATKYHLNGRDSLVNPGVAMATHKDDEERFFPSSGVLMFGKQGAGRDNVDYSSVMLTSEEEIKTTNPVATEQYGVVADNLQQANTGPIVGNVNSQGALPGMVWQNRDVYLQGPIWAKIPHTDGNFHPSPLMGGFGLKHPPPQILIKNTPVPADPPTTFSQAKLASFITQYSTGQVSVEIEWELQKENSKRWNPEIQYTSNYYKSTNVDFAVNTEGTYSEPRPIGTRYLTRNL

SEQ ID NO: 7 - protein, 738 aa, Adeno-associated virus 10
MAADGYLPDWLEDNLSEGIREWWDLKPGAPKPKANQQKQDDGRGLVLPGYKYLGPFNGLDKGEPVNAADAAALEHDKAYDQQLKAGDNPYLRYNHADAEFQERLQEDTSFGGNLGRAVFQAKKRVLEPLGLVEEGAKTAPGKKRPVEPSPQRSPDSSTGIGKKGQQPAKKRLNFGQTGDSESVPDPQPIGEPPAGPSGLGSGTMAAGGGAPMADNNEGADGVGSSSGNWHCDSTWLGDRVITTSTRTWALPTYNNHLYKQISNGTSGGSTNDNTYFGYSTPWGYFDFNRFHCHFSPRDWQRLINNNWGFRPKRLNFKLFNIQVKEVTQNEGTKTIANNLTSTIQVFTDSEYQLPYVLGSAHQGCLPPFPADVFMIPQYGYLTLNNGSQAVGRSSFYCLEYFPSQMLRTGNNFEFSYQFEDVPFHSSYAHSQSLDRLMNPLIDQYLYYLSRTQSTGGTAGTQQLLFSQAGPNNMSAQAKNWLPGPCYRQQRVSTTLSQNNNSNFAWTGATKYHLNGRDSLVNPGVAMATHKDDEERFFPSSGVLMFGKQGAGKDNVDYSSVMLTSEEEIKTTNPVATEQYGVVADNLQQQNAAPIVGAVNSQGALPGMVWQNRDVYLQGPIWAKIPHTDGNFHPSPLMGGFGLKHPPPQILIKNTPVPADPPTTFSQAKLASFITQYSTGQVSVEIEWELQKENSKRWNPEIQYTSNYYKSTNVDFAVNTDGTYSEPRPIGTRYLTRNL

SEQ ID NO: 8 - DNA, 258 bp, Adeno-associated virus 11
ggtaattcctccggaaattggcattgcgattccacatggctgggcgacagagtcatcaccaccagcacccgaacctgggccctgccaacctacaacaaccacctctacaaacaaatctccagcgcttcaacgggggccagcaacgacaaccactactttggctacagcaccccctgggggtattttgactttaacagattccactgccacttctcaccacgtgactggcagcgactcatcaacaacaactggggattc

SEQ ID NO: 9 - DNA, 255 bp, Adeno-associated virus 12
ggtaattcctccggaaattggcattgcgattccacatggctgggcgaccgagtcattaccaccagcacccggacttgggccctgcccacctacaacaaccacctctacaagcaaatctccagccaatcgggtgccaccaacgacaaccactacttcggctacagcaccccttgggggtattttgatttcaacagattccactgccatttctcaccacgtgactggcagcgactcatcaacaacaactggggattc

SEQ ID NO: 10 - DNA, 2208 bp, Adeno-associated virus 2
atggctgccgatggttatcttccagattggctcgaggacactctctctgaaggaataagacagtggtggaagctcaaacctggcccaccaccaccaaagcccgcagagcggcataaggacgacagcaggggtcttgtgcttcctgggtacaagtacctcggacccttcaacggactcgacaagggagagccggtcaacgaggcagacgccgcggccctcgagcacgacaaagcctacgaccggcagctcgacagcggagacaacccgtacctcaagtacaaccacgccgacgcggagtttcaggagcgccttaaagaagatacgtcttttgggggcaacctcggacgagcagtcttccaggcgaaaaagagggttcttgaacctctgggcctggttgaggaacctgttaagacggctccgggaaaaaagaggccggtagagcactctcctgtggagccagactcctcctcgggaaccggaaaggcgggccagcagcctgcaagaaaaagattgaattttggtcagactggagacgcagactcagtacctgacccccagcctctcggacagccaccagcagccccctctggtctgggaactaatacgatggctacaggcagtggcgcaccaatggcagacaataacgagggcgccgacggagtgggtaattcctcgggaaattggcattgcgattccacatggatgggcgacagagtcatcaccaccagcacccgaacctgggccctgcccacctacaacaaccacctctacaaacaaatttccagccaatcaggagcctcgaacgacaatcactactttggctacagcaccccttgggggtattttgacttcaacagattccactgccacttttcaccacgtgactggcaaagactcatcaacaacaactggggattccgacccaagagactcaacttcaagctctttaacattcaagtcaaagaggtcacgcagaatgacggtacgacgacgattgccaataaccttaccagcacggttcaggtgtttactgactcggagtaccagctcccgtacgtcctcggctcggcgcatcaaggatgcctcccgccgttcccagcagacgtcttcatggtgccacagtatggatacctcaccctgaacaacgggagtcaggcagtaggacgctcttcattttactgcctggagtactttccttctcagatgctgcgtaccggaaacaactttaccttcagctacacttttgaggacgttcctttccacagcagctacgctcacagccagagtctggaccgtctcatgaatcctctcatcgaccagtacctgtattacttgagcagaacaaacactccaagtggaaccaccacgcagtcaaggcttcagttttctcaggccggagcgagtgacattcgggaccagtctaggaactggcttcctggaccctgttaccgccagcagcgagtatcaaagacatctgcggataacaacaacagtgaatactcgtggactggagctaccaagtaccacctcaatggcagagactctctggtgaatccgggcccggccatggcaagccacaaggacgatgaagaaaagttttttcctcagagcggggttctcatctttgggaagcaaggctcagagaaaacaaatgtggacattgaaaaggtcatgattacagacgaagaggaaatcaggacaaccaatcccgtggctacggagcagtatggttctgtatctaccaacctccagagaggcaacagacaagcagctaccgcagatgtcaacacacaaggcgttcttccaggcatggtctggcaggacagagatgtgtaccttcaggggcccatctgggcaaagattccacacacggacggacattttcacccctctcccctcatgggtggattcggacttaaacaccctcctccacagattctcatcaagaacaccccggtacctgcgaatccttcgaccaccttcagtgcggcaaagtttgcttccttcatcacacagtactccacgggacaggtcagcgtggagatcgagtgggagctgcagaaggaaaacagcaaacgctggaatcccgaaattcagtacacttccaactacaacaagtctgttaatgtggactttactgtggacactaatggcgtgtattcagagcctcgccccattggcaccagatacctgactcgtaatctgtaa

SEQ ID NO: 11 - protein, 735 aa, Adeno-associated virus 2 [sequence omitted]

SEQ ID NO: 12 - protein, 621 aa, Adeno-associated virus 2
MPGFYEIVIKVPSDLDGHLPGISDSFVNWVAEKEWELPPDSDMDLNLIEQAPLTVAEKLQRDFLTEWRRVSKAPEALFFVQFEKGESYFHMHVLVETTGVKSMVLGRFLSQIREKLIQRIYRGIEPTLPNWFAVTKTRNGAGGGNKVVDECYIPNYLLPKTQPELQWAWTNMEQYLSACLNLTERKRLVAQHLTHVSQTQEQNKENQNPNSDAPVIRSKTSARYMELVGWLVDKGITSEKQWIQEDQASYISFNAASNSRSQIKAALDNAGKIMSLTKTAPDYLVGQQPVEDISSNRIYKILELNGYDPQYAASVFLGWATKKFGKRNTIWLFGPATTGKTNIAEAIAHTVPFYGCVNWTNENFPFNDCVDKMVIWWEEGKMTAKVVESAKAILGGSKVRVDQKCKSSAQIDPTPVIVTSNTNMCAVIDGNSTTFEHQQPLQDRMFKFELTRRLDHDFGKVTKQEVKDFFRWAKDHVVEVEHEFYVKKGGAKKRPAPSDADISEPKRVRESVAQPSTSDAEASINYADRYQNKCSRHVGMNLMLFPCRQCERMNQNSNICFTHGQKDCLECFPVSESQPVSVVKKAYQKLCYIHHIMGKVPDACTACDLVNVDLDDCIFEQ

SEQ ID NO: 13 - DNA, 4675 bp, Adeno-associated virus 2
ttggccactccctctctgcgcgctcgctcgctcactgaggccgggcgaccaaaggtcgcccgacgcccgggctttgcccgggcggcctcagtgagcgagcgagcgcgcagagagggagtggccaactccatcactaggggttcctggaggggtggagtcgtgacgtgaattacgtcatagggttagggaggtcctgtattagaggtcacgtgagtgttttgcgacattttgcgacaccatgtggtcacgctgggtatttaagcccgagtgagcacgcagggtctccattttgaagcgggaggtttgaacgcgcagccgccatgccggggttttacgagattgtgattaaggtccccagcgaccttgacgggcatctgcccggcatttctgacagctttgtgaactgggtggccgagaaggaatgggagttgccgccagattctgacatggatctgaatctgattgagcaggcacccctgaccgtggccgagaagctgcagcgcgactttctgacggaatggcgccgtgtgagtaaggccccggaggcccttttctttgtgcaatttgagaagggagagagctacttccacatgcacgtgctcgtggaaaccaccggggtgaaatccatggttttgggacgtttcctgagtcagattcgcgaaaaactgattcagagaatttaccgcgggatcgagccgactttgccaaactggttcgcggtcacaaagaccagaaatggcgccggaggcgggaacaaggtggtggatgagtgctacatccccaattacttgctccccaaaacccagcctgagctccagtgggcgtggactaatatggaacagtatttaagcgcctgtttgaatctcacggagcgtaaacggttggtggcgcagcatctgacgcacgtgtcgcagacgcaggagcagaacaaagagaatcagaatcccaattctgatgcgccggtgatcagatcaaaaacttcagccaggtacatggagctggtcgggtggctcgtggacaaggggattacctcggagaagcagtggatccaggaggaccaggcctcatacatctccttcaatgcggcctccaactcgcggtcccaaatcaaggctgccttggacaatgcgggaaagattatgagcctgactaaaaccgcccccgactacctggtgggccagcagcccgtggaggacatttccagcaatcggatttataaaattttggaactaaacgggtacgatccccaatatgcggcttccgtctttctgggatgggccacgaaaaagttcggcaagaggaacaccatctggctgtttgggcctgcaactaccgggaagaccaacatcgcggaggccatagcccacactgtgcccttctacgggtgcgtaaactggaccaatgagaactttcccttcaacgactgtgtcgacaagatggtgatctggtgggaggaggggaagatgaccgccaaggtcgtggagtcggccaaagccattctcggaggaagcaaggtgcgcgtggaccagaaatgcaagtcctcggcccagatagacccgactcccgtgatcgtcacctccaacaccaacatgtgcgccgtgattgacgggaactcaacgaccttcgaacaccagcagccgttgcaagaccggatgttcaaatttgaactcacccgccgtctggatcatgactttgggaaggtcaccaagcaggaagtcaaagactttttccggtgggcaaaggatcacgtggttgaggtggagcatgaattctacgtcaaaaagggtggagccaagaaaagacccgcccccagtgacgcagatataagtgagcccaaacgggtgcgcgagtcagttgcgcagccatcgacgtcagacgcggaagcttcgatcaactacgcagacaggtaccaaaacaaatgttctcgtcacgtgggcatgaatctgatgctgtttccctgcagacaatgcgagagaatgaatcagaattcaaatatctgcttcactcacggacagaaagactgtttagagtgctttcccgtgtcagaatctcaacccgtttctgtcgtcaaaaaggcgtatcagaaactgtgctacattcatcatatcatgggaaaggtgccagacgcttgcactgcctgcgatctggtcaatgtggatttggatgactgcatctttgaacaataaatgatttaaatcaggtatggctgccgatggttatcttccagattggctcgaggacactctctctgaaggaataagacagtggtggaagctcaaacctggcccaccaccaccaaagcccgcagagcggcataaggacgacagcaggggtcttgtgcttcctgggtacaagtacctcggacccttcaacggactcgacaagggagagccggtcaacgaggcagacgccgcggccctcgagcacgtacaaagcctacgaccggcagctcgacagcggagacaacccgtacctcaagtacaaccacgccgacgcggagtttcaggagcgccttaaagaagatacgtcttttgggggcaacctcggacgagcagtcttccaggcgaaaaagagggttcttgaacctctgggcctggttgaggaacctgttaagacggctccgggaaaaaagaggccggtagagcactctcctgtggagccagactcctcctcgggaaccggaaaggcgggccagcagcctgcaagaaaaagattgaattttggtcagactggagacgcagactcagtacctgacccccagcctctcggacagccaccagcagccccctctggtctgggaactaatacgatggctacaggcagtggcgcaccaatggcagacaataacgagggcgccgacggagtgggtaattcctccggaaattggcattgcgattccacatggatgggcgacagagtcatcaccaccagcacccgaacctgggccctgcccacctacaacaaccacctctacaaacaaatttccagccaatcaggagcctcgaacgacaatcactactttggctacagcaccccttgggggtattttgacttcaacagattccactgccacttttcaccacgtgactggcaaagactcatcaacaacaactggggattccgacccaagagactcaacttcaagctctttaacattcaagtcaaagaggtcacgcagaatgacggtacgacgacgattgccaataaccttaccagcacggttcaggtgtttactgactcggagtaccagctcccgtacgtcctcggctcggcgcatcaaggatgcctcccgccgttcccagcagacgtcttcatggtgccacagtatggatacctcaccctgaacaacgggagtcaggcagtaggacgctcttcattttactgcctggagtactttccttctcagatgctgcgtaccggaaacaactttaccttcagctacacttttgaggacgttcctttccacagcagctacgctcacagccagagtctggaccgtctcatgaatcctctcatcgaccagtacctgtattacttgagcagaacaaacactccaagtggaaccaccacgcagtcaaggcttcagttttctcaggccggagcgagtgacattcgggaccagtctaggaactggcttcctggaccctgttaccgccagcagcgagtatcaaagacatctgcggataacaacaacagtgaatactcgtggactggagctaccaagtaccacctcaatggcagagactctctggtgaatccggccatggcaagccacaaggacgatgaagaaaagttttttcctcagagcggggttctcatctttgggaagcaaggctcagagaaaacaaatgtgaacattgaaaaggtcatgattacagacgaagaggaaatcggaacaaccaatcccgtggctacggagcagtatggttctgtatctaccaacctccagagaggcaacagacaagcagctaccgcagatgtcaacacacaaggcgttcttccaggcatggtctggcaggacagagatgtgtaccttcaggggcccatctgggcaaagattccacacacggacggacattttcacccctctcccctcatgggtggattcggacttaaacaccctcctccacagattctcatcaagaacaccccggtacctgcgaatccttcgaccaccttcagtgcggcaaagtttgcttccttcatcacacagtactccacgggacacggtcagcgtggagatcgagtgggagctgcagaaggaaaacagcaaacgctggaatcccgaaattcagtacacttccaactacaacaagtctgttaatcgtggacttaccgtggatactaatggcgtgtattcagagcctcgccccattggcaccagatacctgactcgtaatctgtaattgcttgttaatcaataaaccgtttaattcgtttcagttgaactttggtctctgcgtatttctttcttatctagtttccatggctacgtagataagtagcatggcgggttaatcattaactacaaggaacccctagtgatggagttggccactccctctctgcgcgctcgctcgctcactgaggccgggcgaccaaaggtcgcccgacgcccgggctttgcccgggcggcctcagtgagcgagcgagcgcgcagagagggagtggccaa

SEQ ID NO: 14 - DNA, 4679 bp, Adeno-associated virus 2
ttggccactccctctctgcgcgctcgctcgctcactgaggccgggcgaccaaaggtcgcccgacgcccgggctttgcccgggcggcctcagtgagcgagcgagcgcgcagagagggagtggccaactccatcactaggggttcctggaggggtggagtcgtgacgtgaattacgtcatagggttagggaggtcctgtattagaggtcacgtgagtgttttgcgacattttgcgacaccatgtggtcacgctgggtatttaagcccgagtgagcacgcagggtctccattttgaagcgggaggtttgaacgcgcagccgccatgccggggttttacgagattgtgattaaggtccccagcgaccttgacgggcatctgcccggcatttctgacagctttgtgaactgggtggccgagaaggaatgggagttgccgccagattctgacatggatctgaatctgattgagcaggcacccctgaccgtggccgagaagctgcagcgcgactttctgacggaatggcgccgtgtgagtaaggccccggaggcccttttctttgtgcaatttgagaagggagagagctacttccacatgcacgtgctcgtggaaaccaccggggtgaaatccatggttttgggacgtttcctgagtcagattcgcgaaaaactgattcagagaatttaccgcgggatcgagccgactttgccaaactggttcgcggtcacaaagaccagaaatggcgccggaggcgggaacaaggtggtggatgagtgctacatccccaattacttgctccccaaaacccagcctgagctccagtgggcgtggactaatatggaacagtatttaagcgcctgtttgaatctcacggagcgtaaacggttggtggcgcagcatctgacgcacgtgtcgcagacgcaggagcagaacaaagagaatcagaatcccaattctgatgcgccggtgatcagatcaaaaacttcagccaggtacatggagctggtcgggtggctcgtggacaaggggattacctcggagaagcagtggatccaggaggaccaggcctcatacatctccttcaatgcggcctccaactcgcggtcccaaatcaaggctgccttggacaatgcgggaaagattatgagcctgactaaaaccgcccccgactacctggtgggccagcagcccgtggaggacatttccagcaatcggatttataaaattttggaactaaacgggtacgatccccaatatgcggcttccgtctttctgggatgggccacgaaaaagttcggcaagaggaacaccatctggctgtttgggcctgcaactaccgggaagaccaacatcgcggaggccatagcccacactgtgcccttctacgggtgcgtaaactggaccaatgagaactttcccttcaacgactgtgtcgacaagatggtgatctggtgggaggaggggaagatgaccgccaaggtcgtggagtcggccaaagccattctcggaggaagcaaggtgcgcgtggaccagaaatgcaagtcctcggcccagatagacccgactcccgtgatcgtcacctccaacaccaacatgtgcgccgtgattgacgggaactcaacgaccttcgaacaccagcagccgttgcaagaccggatgttcaaatttgaactcacccgccgtctggatcatgactttgggaaggtcaccaagcaggaagtcaaagactttttccggtgggcaaaggatcacgtggttgaggtggagcatgaattctacgtcaaaaagggtggagccaagaaaagacccgcccccagtgacgcagatataagtgagcccaaacgggtgcgcgagtcagttgcgcagccatcgacgtcagacgcggaagcttcgatcaactacgcagacaggtaccaaaacaaatgttctcgtcacgtgggcatgaatctgatgctgtttccctgcagacaatgcgagagaatgaatcagaattcaaatatctgcttcactcacggacagaaagactgtttagagtgctttcccgtgtcagaatctcaacccgtttctgtcgtcaaaaaggcgtatcagaaactgtgctacattcatcatatcatgggaaaggtgccagacgcttgcactgcctgcgatctggtcaatgtggatttggatgactgcatctttgaacaataaatgatttaaatcaggtatggctgccgatggttatcttccagattggctcgaggacactctctctgaaggaataagacagtggtggaagctcaaacctggcccaccaccaccaaagcccgcagagcggcataaggacgacagcaggggtcttgtgcttcctgggtacaagtacctcggacccttcaacggactcgacaagggagagccggtcaacgaggcagacgccgcggccctcgagcacgacaaagcctacgaccggcagctcgacagcggagacaacccgtacctcaagtacaaccacgccgacgcggagtttcaggagcgccttaaagaagatacgtcttttgggggcaacctcggacgagcagtcttccaggcgaaaaagagggttcttgaacctctgggcctggttgaggaacctgttaagacggctccgggaaaaaagaggccggtagagcactctcctgtggagccagactcctcctcgggaaccggaaaggcgggccagcagcctgcaagaaaaagattgaattttggtcagactggagacgcagactcagtacctgacccccagcctctcggacagccaccagcagccccctctggtctgggaactaatacgatggctacaggcagtggcgcaccaatggcagacaataacgagggcgccgacggagtgggtaattcctccggaaattggcattgcgattccacatggatgggcgacagagtcatcaccaccagcacccgaacctgggccctgcccacctacaacaaccacctctacaaacaaatttccagccaatcaggagcctcgaacgacaatcactactttggctacagcaccccttgggggtattttgacttcaacagattccactgccacttttcaccacgtgactggcaaagactcatcaacaacaactggggattccgacccaagagactcaacttcaagctctttaacattcaagtcaaagaggtcacgcagaatgacggtacgacgacgattgccaataaccttaccagcacggttcaggtgtttactgactcggagtaccagctcccgtacgtcctcggctcggcgcatcaaggatgcctcccgccgttcccagcagacgtcttcatggtgccacagtatggatacctcaccctgaacaacgggagtcaggcagtaggacgctcttcattttactgcctggagtactttccttctcagatgctgcgtaccggaaacaactttaccttcagctacacttttgaggacgttcctttccacagcagctacgctcacagccagagtctggaccgtctcatgaatcctctcatcgaccagtacctgtattacttgagcagaacaaacactccaagtggaaccaccacgcagtcaaggcttcagttttctcaggccggagcgagtgacattcgggaccagtctaggaactggcttcctggaccctgttaccgccagcagcgagtatcaaagacatctgcggataacaacaacagtgaatactcgtggactggagctaccaagtaccacctcaatggcagagactctctggtgaatccgggcccggccatggcaagccacaaggacgatgaagaaaagttttttcctcagagcggggttctcatctttgggaagcaaggctcagagaaaacaaatgtggacattgaaaaggtcatgattacagacgaagaggaaatcaggacaaccaatcccgtggctacggagcagtatggttctgtatctaccaacctccagagaggcaacagacaagcagctaccgcagatgtcaacacacaaggcgttcttccaggcatggtctggcaggacagagatgtgtaccttcaggggcccatctgggcaaagattccacacacggacggacattttcacccctctcccctcatgggtggattcggacttaaacaccctcctccacagattctcatcaagaacaccccggtacctgcgaatccttcgaccaccttcagtgcggcaaagtttgcttccttcatcacacagtactccacgggacaggtcagcgtggagatcgagtgggagctgcagaaggaaaacagcaaacgctggaatcccgaaattcagtacacttccaactacaacaagtctgttaatgtggactttactgtggacactaatggcgtgtattcagagcctcgccccattggcaccagatacctgactcgtaatctgtaattgcttgttaatcaataaaccgtttaattcgtttcagttgaactttggtctctgcgtatttctttcttatctagtttccatggctacgtagataagtagcatggcgggttaatcattaactacaaggaacccctagtgatggagttggccactccctctctgcgcgctcgctcgctcactgaggccgggcgaccaaaggtcgcccgacgcccgggctttgcccgggcggcctcagtgagcgagcgagcgcgcagagagggagtggccaa

SEQ ID NO: 15 - protein, 725 aa, Adeno-associated virus 5
MAADGYLPDWLEDTLSEGIRQWWKLKPGPPPPKPAERHKDDSRGLVLPGYKYLGPFNGLDKGEPVNEADAAALEHDKAYDRQLDSGDNPYLKYNHADAEFQERLKEDTSFGGNLGRAVFQAKKRVLEPFGLVEEGAKTAPTGKRIDDHFPKRKKARTEEDSKPSTSSDAEAGPSGSQQLQIPAQPASSLGADTMSAGGGGPLGDNNQGADGVGNASGDWHCDSTWMGDRVVTKSTRTWVLPSYNNHQYREIKSGSVDGSNANAYFGYSTPWGYFDFNRFHSHWSPRDWQRLINNYWGFRPRSLRVKIFNIQVKEVTVQDSTTTIANNLTSTVQVFTDDDYQLPYVVGNGTEGCLPAFPPQVFTLPQYGYATLNRDNTENPTERSSFFCLEYFPSKMLRTGNNFEFTYNFEEVPFHSSFAPSQNLFKLANPLVDQYLYRFVSTNNTGGVQFNKNLAGRYANTYKNWFPGPMGRTQGWNLGSGVNRASVSAFATTNRMELEGASYQVPPQPNGMTNNLQGSNTYALENTMIFNSQPANPGTTATYLEGNMLITSESETQPVNRVAYNVGGQMATNNQSSTTAPTTGTYNLQEIVPGSVWMERDVYLQGPIWAKIPETGAHFHPSPAMGGFGLKHPPPMMLIKNTPVPGNITSFSDVPVSSFITQYSTGQVTVEMEWELKKENSKRWNPEIQYTNNYNDPQFVDFAPDSTGEYRTTRPIGTRYLTRPL

SEQ ID NO: 16 - protein, 644 aa, Adeno-associated virus
  MOD_RES (434)..(434): Xaa = any amino acid
KAYDQQLKAGDNPYLRYNHADAEFQERLQEDTSFGGNLGRAVFQAKKRVLEPLGLVETPAKTAPGKKRPVDSPDSTSGIGKKGQQPAKKRLNFGQTGDSESVPDPQPIGEPPAGPSGLGSGTMAAGGGAPMADNNEGADGVGNASGNWHCDSTWLGDRVITTSTRTWALPTYNNHLYKQISSQSAGSTNDNVYFGYSTPWGYFDFNRFHCHFSPRDWQRLINNNWGFRPKKLNFKLFNIQVKEVTTNDGVTTIANNLTSTVQVFSDSEYQLPYVLGSAHQGCLPPFPADVFMIPQYGYLTLNNGSQSVGRSSFYCLEYFPSQMLRTGNNFTFSYTFEDVPFHSSYAHSQSLDRLMNPLIDQYLYYLARTQSNAGGTAGNRELQFYQGGPTTMAEQAKNWLPGPCFRQQRVSKTLDQNNNSNFAWTGATKYHLNXRNSLVNPGVAMATHKDDEERFFPSSGVLIFGKTGAANKTTLENVLMTNEEEIRPTNPVATEEYGIVSSNLQAASTAAQTQVVNNQGALPGMVWQNRDVYLQGPIWAKIPHTDGNFHPSPLMGGFGLKHPPPQILIKNTPVPANPPEVFTPAKFASFITQYSTGQVSVEIEWELQKENSKRWNPEIQYTSNFDKQTGVDFAVDSQGVYSEP

SEQ ID NO: 17 - DNA, 1933 bp, Adeno-associated virus
caaggcctacgaccagcagctcaaagcgggtgacaatccgtacctgcggtataaccacgccgacgccgagtttcaggagtgtcttcaagaagatacgtcttttgggggcaacctcgggcgagcagtcttccaggccaaaaagcgggttctcgaacctcttggtctggttgagacgccagctaagacggcacctggaaagaagcgaccggtagactcgccagactccacctcgggcatcggcaagaaaggccagcagcccgcgaaaaagagactcaactttgggcagactggcgactcagagtcagtccccgaccctcaaccaatcggagaaccaccagcaggcccctctggtctgggatctggtacaatggttgcaggcggtggcgcaccaatggctgacaataacgagggcgccgacggagtgggtaatgcctcaggaaattggcattgcgattccacatggctgggcgacagagtcatcaccaccagcacccgaacctgggccctgcccacctacaacaaccacctctacaagcaaatctccagtcagtcagcagggagcaccaacgataacgtctatttcggctacagcaccccctgggggtattttgacttcaacagattccattgccacttctcaccacgtgactggcagcgacttatcaacaacaactggggattccggcccaagaagctcaacttcaagctcttcaacatccaggtcaaggaggtcacgacgaatgacggtgtcacaaccatcgctaataaccttaccagcacggttcaggtcttttcggactcggaatatcaactgccgtacgtcctcggctccgcgcaccagggctgcctgcctccgttcccggcagacgtgttcatgattccgcagtacggatacctgactctgaacaatggcagccaatcggtaggccgttcctccttctactgcctggagtactttccttctcagatgctgagaacgggcaacaacttcacctttagctacaccttcgaggacgtgcctttccacagcagctacgcgcacagccagagtctggaccggctgatgaatcccctcatcgaccagtacctgtactacttggccagaacacagagcaacgcaggaggtactgctggcaatcgggaactgcagttttatcagggcggacctaccaccatggccgaacaagcaaagaactggctgcccggaccttgcttccggcaacagagagtatccaagacgctggatcaaaataacaacagcaactttgcctggactggtgccacaaaataccatttaaatggaagaaattcattggttaatcccggtgtcgccatggcaacccacaaggacgacgaggaacgcttctccccttcgagcggagttctaatttttggcaaaactggagcagctaataaaactacattagaaaacgtgctcatgacaaatgaagaagaaattcgtcctaccaacccggtagctaccgaggaatacgggattgtaagcagcaacttgcaggcggctagcaccgcagcccagacacaagttgttaacaaccagggagccttacctggcatggtctggcagaaccgggacgtgtacctgcaaggtcccatttgggccaagattcctcacacggacggcaactttcacccgtctcctctaatgggtggctttggactgaaacacccgcctccccagatcctgatcaaaaacacgccggtacctgctaatcctccagaagtgtttactcctgccaagtttgcttccttcatcacgcagtacagcaccgggcaagtcagcgttgagatcgagtgggagctgcagaaagagaacagcaagcgctggaacccagagattcagtacacctccaactttgacaaacagactggagtggactttgctgttgacagccagggtgtttactctgagcct

SEQ ID NO: 18 - protein, 644 aa, Adeno-associated virus
KAYDQQLKAGDNPYLRYNHADAEFQECLQEDTSFGGNLGRAVFQAKKRVLEPLGLVETPAKTAPGKKRPVDSPDSTSGIGKKGQQPAKKRLNFGQTGDSESVPDPQPIGEPPAGPSGLGSGTMVAGGGAPMADNNEGADGVGNASGNWHCDSTWLGDRVITTSTRTWALPTYNNHLYKQISSQSAGSTNDNVYFGYSTPWGYFDFNRFHCHFSPRDWQRLINNNWGFRPKKLNFKLFNIQVKEVTTNDGVTTIANNLTSTVQVFSDSEYQLPYVLGSAHQGCLPPFPADVFMIPQYGYLTLNNGSQSVGRSSFYCLEYFPSQMLRTGNNFTFSYTFEDVPFHSSYAHSQSLDRLMNPLIDQYLYYLARTQSNAGGTAGNRELQFYQGGPTTMAEQAKNWLPGPCFRQQRVSKTLDQNNNSNFAWTGATKYHLNGRNSLVNPGVAMATHKDDEERFSPSSGVLIFGKTGAANKTTLENVLMTNEEEIRPTNPVATEEYGIVSSNLQAASTAAQTQVVNNQGALPGMVWQNRDVYLQGPIWAKIPHTDGNFHPSPLMGGFGLKHPPPQILIKNTPVPANPPEVFTPAKFASFITQYSTGQVSVEIEWELQKENSKRWNPEIQYTSNFDKQTGVDFAVDSQGVYSEP

SEQ ID NO: 19 - DNA, 1933 bp, Adeno-associated virus
caaggcctacgaccagcagctcaaagcgggtgacaatccgtacctgcggtataaccacgccgacgccgagtttcaggagcgtcttcaagaagatacgtcttttgggggcaacctcgggcgagcagtcttccaggccaaaaagcgggttctcgaacctcttggtctggttgagacgccagctaagacggcacctggaaagaagcgaccggtagactcgccagactccacctcgggcatcggcaagaaaggccagcagcccgcgaaaaagagactcaactttgggcagactggcgactcagagccagtccccgaccctcaaccaatcggagaaccaccagcaggcccctctggtctgggatctggtacaatggctgcaggcggtggcgcaccaatggctgacaataacgagggcgccgacggagtgggtaatgcctcaggaaattggcattgcgattccacacggctgggcgacagagtcatcaccaccagcacccgaacctgggccctgcccacctacaacaaccacctctacaagcaaatctccagtcagtcagcagggagcaccaacgataacgtctatttcggctacagcaccccctgggggtattttgacttcaacagattccattgccacttctcaccacgtgactggcagcgacttatcaacaacaactggggattccggcccaagaagctcaacttcaagctcttcaacatccaggtcaaggaggtcacgacgaatgacggcgtcacaaccatcgctaataaccttaccagcacggttcaggtcttttcggactcggaatatcaactgccgtacgtcctcggctccgcgcaccagggctgcctgcctccgttcccggcagacgtgttcatgattccgcagtacggatacctgactctgaacaatggcagccaatcggtaggccgttcctccttctactgcctggagtactttccttctcagatgctgagaacgggcaacaacttcacctttagctacaccttcgaggacgtgcctttccacagcagctacgcgcacagccagagtctgggccggctgatgaatcccctcatcgaccagtacctgtactacttggccagaacacagagcaacgcaggaggtactgctggcaatcgggaactgcagttttatcagggcggacctaccaccatggccgaacaagcaaagaactggctgcccggaccttgcttccggcaacagagagtatccaagacgctggatcaaaataacaacagcaactttgcctggactggtgccacaaaataccatttaaatggaagaaattcattggttaatcccggtgtcgccatggcaacccacaaggacgacgaggaacgcttcttcccttcgagcggagttctaatttttggcaaaactggagcagctaataaaactacattagaaaacgtgctcatgacaaatgaagaagaaattcgtcctaccaacccggtagctaccgaggaatacgggattgtaagcagcaacttgcaggcggctagcaccgcagcccagacacaagttgttaacaaccagggagccttacctggcatggtctggcagaaccgggacgtgtacctgcaaggtcccatttgggccaagattcctcacacggacggcaactttcacccgtctcctctaatgggtggctttggactgaaacacccgcctccccagatcctgatcaaaaacacaccggtacctgctaatcctccagaagtgtttactcctgccaagtttgcttccttcatcacgcagtacagcaccgggcaagtcagcgttgagatcgaatgggagctgcagaaagagaacagcaagcgctggaacccagagattcagtacacctccaactttgacaaacagactggagtggactttgctgttgacagccagggtgtttactctgagcct

SEQ ID NO: 20 - protein, 644 aa, Adeno-associated virus
KAYDQQLKAGDNPYLRYNHADAEFQERLQEDTSFGGNLGRAVFQAKKRVLEPLGLVETPAKTAPGKKRPVDSPDSTSGIGKKGQQPAKKRLNFGQTGDSEPVPDPQPIGEPPAGPSGLGSGTMAAGGGAPMADNNEGADGVGNASGNWHCDSTRLGDRVITTSTRTWALPTYNNHLYKQISSQSAGSTNDNVYFGYSTPWGYFDFNRFHCHFSPRDWQRLINNNWGFRPKKLNFKLFNIQVKEVTTNDGVTTIANNLTSTVQVFSDSEYQLPYVLGSAHQGCLPPFPADVFMIPQYGYLTLNNGSQSVGRSSFYCLEYFPSQMLRTGNNFTFSYTFEDVPFHSSYAHSQSLGRLMNPLIDQYLYYLARTQSNAGGTAGNRELQFYQGGPTTMAEQAKNWLPGPCFRQQRVSKTLDQNNNSNFAWTGATKYHLNGRNSLVNPGVAMATHKDDEERFFPSSGVLIFGKTGAANKTTLENVLMTNEEEIRPTNPVATEEYGIVSSNLQAASTAAQTQVVNNQGALPGMVWQNRDVYLQGPIWAKIPHTDGNFHPSPLMGGFGLKHPPPQILIKNTPVPANPPEVFTPAKFASFITQYSTGQVSVEIEWELQKENSKRWNPEIQYTSNFDKQTGVDFAVDSQGVYSEP

SEQ ID NO: 21 - DNA, 1933 bp, Adeno-associated virus; identical to SEQ ID NO: 19

SEQ ID NO: 22 - protein, 644 aa, Adeno-associated virus; identical to SEQ ID NO: 20

SEQ ID NO: 23 - DNA, 1933 bp, Adeno-associated virus
caaggcctacgaccagcagctcaaagcgggtgacaatccgtacctgcggtataaccacgccgacgccgagtttcaggagcgtcttcaagaagatacgtcttttgggggcaacctcgggcgagcagtcttccaggccaaaaagcgggttctcgaacctcttggtctggttgagacgccagctaagacggcacctggaaagaagcgaccggtagactcgccagactccacctcgggcatcggcaagaaaggccagcagcccgcgaaaaagagactcaactttgggcagactggcgactcagagtcagtccccgaccctcaaccaatcggagaaccaccagcaggcccctctggtctgggatctggtacaatggctgcaggcggtggcgcaccaatggctgacaatagcgagggcgccgacggagtgggtaatgcctcaggaaattggcattgcgattccacatggctgggcgacagagtcatcaccaccagcacccgaacctgggccctgcccacctacaacaaccacctctacaagcaaatctccagtcagtcagcagggagcaccaacgataacgtctatttcggctacagcaccccctgggggtattttgacttcaacagattccattgccacttctcaccacgtgactggcagcgacttatcaacaacaactggggattccggcccaagaagctcaacttcaagctcttcaacatccaggtcaaggaggtcacgacgaatgacggtgtcacaaccatcgctaataaccttaccagcacggttcaggtcttttcggactcggaatatcaactgccgtacgtcctcggctccgcgcaccagggctgcctgcctccgttcccggcagacgtgttcatgattccgcagtacggatacctgactctgaacaatggcagccaatcggtaggccgttcctccttctactgcctggagtactttccttctcagatgctgagaacgggcaacaacttcacctttagctacaccttcgaggacgtgcctttccacagcagctacgcgcacagccagagtctggaccggctgatgaatcccctcatcgaccagtacctgtactacttggccagaacacagagcaacgcaggaggtactgctggcaatcgggaactgcagttttatcagggcggacctaccaccatggccgaacaagcaaagaactggctgcccggaccttgcttccggcaacagagagtatccaagacgctggatcaaaataacaacagcaactttgcctggactggtgccacaaaataccatttaaatggaagaaattcattggttaatcccggtgtcgccatggcaacccacaaggacgacgaggaacgcttcttcccttcgagcggagttctaatttttggcaaaactggagcagctaataaaactacattagaaaacgtgctcatgacaaatgaagaagaaattcgtcctaccaacccggtagctaccgaggaatacgggattgtaagcagcaacttgcaggcggctagcaccgcagcccagacacaagttgttaacaaccagggagccttacctggcatggtctggcagaaccgggacgtgtacctgcaaggtcccatttgggccaagattcctcacacggacggcaactttcacccgtctcctctaatgggtggctttggactgaaacacccgcctccccagatcctgatcaaaaacacaccggtacctgctaatcctccagaagtgtttactcctgccaagcttgcttccttcatcacgcagtacagcaccgggcaagtcagcgttgagatcgagtgggagctgcagaaagagaacagcaagcgctggaacccagagattcagtacacctccaactttgacaaacagactggagtggactttgctgttgacagccagggtgtttactctgagcct

SEQ ID NO: 24 - protein, 644 aa, Adeno-associated virus
KAYDQQLKAGDNPYLRYNHADAEFQERLQEDTSFGGNLGRAVFQAKKRVLEPLGLVETPAKTAPGKKRPVDSPDSTSGIGKKGQQPAKKRLNFGQTGDSESVPDPQPIGEPPAGPSGLGSGTMAAGGGAPMADNSEGADGVGNASGNWHCDSTWLGDRVITTSTRTWALPTYNNHLYKQISSQSAGSTNDNVYFGYSTPWGYFDFNRFHCHFSPRDWQRLINNNWGFRPKKLNFKLFNIQVKEVTTNDGVTTIANNLTSTVQVFSDSEYQLPYVLGSAHQGCLPPFPADVFMIPQYGYLTLNNGSQSVGRSSFYCLEYFPSQMLRTGNNFTFSYTFEDVPFHSSYAHSQSLDRLMNPLIDQYLYYLARTQSNAGGTAGNRELQFYQGGPTTMAEQAKNWLPGPCFRQQRVSKTLDQNNNSNFAWTGATKYHLNGRNSLVNPGVAMATHKDDEERFFPSSGVLIFGKTGAANKTTLENVLMTNEEEIRPTNPVATEEYGIVSSNLQAASTAAQTQVVNNQGALPGMVWQNRDVYLQGPIWAKIPHTDGNFHPSPLMGGFGLKHPPPQILIKNTPVPANPPEVFTPAKLASFITQYSTGQVSVEIEWELQKENSKRWNPEIQYTSNFDKQTGVDFAVDSQGVYSEP

SEQ ID NO: 25 - DNA, 1933 bp, Adeno-associated virus
caaggcctacgaccagcagctcaaagcgggtgacaatccgtacctgcggtataaccacgccgacgccgagtttcaggagcgtcttcaagaagatacgtcttttgggggcaacctcgggcgagcagtcttccaggccaaaaagcgggttctcgaacctcttggtctggttgagacgccagctaagacggcacctggaaagaagcgaccggtagactcgccagactccacctcgggcatcggcaagaaaggccagcagcccgcgaaaaagagactcaactttgggcagactggcgactcagagtcagtccccgaccctcaaccaatcggagaaccaccagcaggcccctctggtctgggatctggtacaatggctgcaggcggtggcgcaccaatggctgacaataacgagggcgccgacggagtgggtaatgcctcaggaaattggcattgcgattccacatggctgggcgacagagtcatcaccaccagcacccgaacctgggccctgcccacctacaacaaccacctctacaagcaaatctccagtcagtcagcagggagcaccaacgataacgtctatttcggctacagcaccccctgggggtattttgacttcaacagattccattgccacttctcaccacgtgactggcagcgacttatcaacaacaactggggattccggcccaagaagctcaacttcaagctcttcaacatccaggtcaaggaggtcacgacgaatgacggcgtcacaaccatcgctaataaccttaccagcacggttcaggtcttttcggacccggaatatcaactgccgtacgtcctcggctccgcgcaccagggctgcctgcctccgttcccggcagacgtgttcatgattccgcagtacggatacctgactctgaacaatggcagccaatcggtaggccgttcctccttctactgcctggagtactttccttctcagatgctgagaacgggcaacaacttcacctttagctacaccttcgaggacgtgcctttccacagcagctacgcgcacagccagagtctggaccggctgatgaatcccctcatcgaccagtacctgtactacttggccagaacacagagcaacgcaggaggtactgctggcaatcgggaactgcagttttatcagggcggacctaccaccatggccgaacaagcaaagaactggctgcccggaccttgcttccggcaacagagagtatccaagacgctggatcaaaataacaacagcaactttgcctggactggtgccacaaaataccatttaaatggaagaaattcattggttaatcccggtgtcgccatggcaacccacaaggacgacgaggaacgcttcttcccttcgagcggagttctaatttttggcaaaactggagcagctaataaaactacattagaaaacgtgctcatgacaaatgaagaagaaattcgtcctaccaacccggtagctaccgaggaatacgggattgtaagcagcaacttgcaggcggctagcaccgcagcccagacacaagttgttaacaaccagggagccttacctggcatggtctggcagaaccgggacgtgtacctgcaaggtcccatttgggccaagattcctcacacggacggcaactttcacccgtctcctctaatgggtggctttggactgaaacacccgcctccccagatcctgatcaaaaacacaccggtacctgctaatcctccagaagtgtttactcctgccaagattgcttccttcatcacgcagtacagcaccgggcaagtcagcgttgagatcgagtgggagctgcagaaagagaacagcaagcgctggaacccagagattcagtacacctccaactttgacaaacagactggagtggactttgctgttgacagccagggtgtttactctgagcct

SEQ ID NO: 26 - protein, 644 aa, Adeno-associated virus
KAYDQQLKAGDNPYLRYNHADAEFQERLQEDTSFGGNLGRAVFQAKKRVLEPLGLVETPAKTAPGKKRPVDSPDSTSGIGKKGQQPAKKRLNFGQTGDSESVPDPQPIGEPPAGPSGLGSGTMAAGGGAPMADNNEGADGVGNASGNWHCDSTWLGDRVITTSTRTWALPTYNNHLYKQISSQSAGSTNDNVYFGYSTPWGYFDFNRFHCHFSPRDWQRLINNNWGFRPKKLNFKLFNIQVKEVTTNDGVTTIANNLTSTVQVFSDPEYQLPYVLGSAHQGCLPPFPADVFMIPQYGYLTLNNGSQSVGRSSFYCLEYFPSQMLRTGNNFTFSYTFEDVPFHSSYAHSQSLDRLMNPLIDQYLYYLARTQSNAGGTAGNRELQFYQGGPTTMAEQAKNWLPGPCFRQQRVSKTLDQNNNSNFAWTGATKYHLNGRNSLVNPGVAMATHKDDEERFFPSSGVLIFGKTGAANKTTLENVLMTNEEEIRPTNPVATEEYGIVSSNLQAASTAAQTQVVNNQGALPGMVWQNRDVYLQGPIWAKIPHTDGNFHPSPLMGGFGLKHPPPQILIKNTPVPANPPEVFTPAKIASFITQYSTGQVSVEIEWELQKENSKRWNPEIQYTSNFDKQTGVDFAVDSQGVYSEP

SEQ ID NO: 27 - protein, 738 aa, Adeno-associated virus
MAADGYLPDWLEDNLSEGIREWWALKPGAPKPKANQQKQDDGRGLVLPGYKYLGPFNGLDKGEPVNAADAAALEHDKAYDQQLKAGDNPYLRYNHADAEFQERLQEDTSFGGNLGRAVFQAKKRVLEPLGLVEEGAKTAPGKKRPVEPSPQRSPDSTTGIGKKGQQPAKKRLNFGQTGDSESVPDPQPIGEPPAGPSGLGSGTMAAGGGAPMADNNEGADGVGSSSGNWHCDSTWLGDRVITTSTRTWALPTYNNHLYKQISNGTSGGSTNDNTYFGYSTPWGYFDFNRFHCHFSPRDWQRLINNNWGFRPKRLNFKLFNIQVKEVTQNEGTKTIANNLTSTIQVFTDSEYQLPYVLGSARQGCLPPFPADVFMIPQYGYLTLNNGSQAVGRSSFYCLEYFPSQMLRTGNNFEFSYQFEDVPFHSSYAHSQSLDRLMNPLIDQYLYYLSRTQSTGGTAGTQQLLFSQAGPNNMSAQAKNWLPGPCYRQQRVSTTLSQNNNSNFAWTGATKYHLNGRDSLVNPGVAMATHKDDEERFFPSSGVLMFGKQGAGKGNVDYSSVMLTSEEEIKTTNPVATEQYGVVADNLQQQNAAPIVGAVNSQGALPGMVWQNRDVYLQGPIWAKIPHTDGNFHPSPLMGGFGLKHPPPQILIKNTPVPADPPTTFSQAKLASFITQYSTGQVSVEIEWELQKENSKRWNPEIQYTSNYYKSTNVDFAVNTDGTYSEPRPIGTRYLTRNL

SEQ ID NO: 28 - DNA, 3121 bp, Adeno-associated virus
gaattcgcccttctacggctgcgtcaactggaccaatgagaactttcccttcaacgactgtgtcgacaagatggtgatctggtgggaggaggggaagatgaccgccaaggtcgtggagtcggccaaagccattctcggaggaagcaaggtgcgcgtggaccagaaatgcaagtcctcggcccagatagacccgactcccgtgatcgtcacctccaacaccaacatgtgcgccgtgattgacgggaactcaacgaccttcgaacaccagcagccgttgcaagaccggatgttcaaatttgaactcacccgccgtctggatcatgactttgggaaggtcaccaagcaggaagtcaaagactttttccggtgggcaaaggatcacgtggttgaggtggagcacgaattctacgtcaaaaagggtggagccaagaaaagacccgcccccagtgacgcagatataagtgagcccaaacgggtgcgcgagtcagttgcgcagccatcgacgtcagacgcggaagcttcgatcaactacgcagacaggtaccaaaacaaatgttctcgtcacgcgggcatgaatctgatgctgtttccctgcagacaatgcgagagaatgaatcagaattcaaatatctgcttcactcacggacagaaagactgtttagagtgctttcccgtgtcagaatctcaacccgtttctgtcgtcaaaaaggcgtatcagaaactgtgctacattcatcatatcatgggaaaggtgccagacgcttgcactgcctgcgatctggtcgatgtggatttggatgactgcatctttgaacaataaatgatttaaatcaggtatggctgccgatggttatcttccagattggctcgaggacaacctctctgagggcattcgcgagtggtgggcgctgaaacctggagccccgaagcccaaagccaaccagcaaaagcaggacggcggccggggtctggtgcttcctggctacaagtacctcggacccttcaacggactcgacaagggggagcccgtcaacgcggcggacgcagcggccctcgagcacgacaaggcctacgaccagcagctcaaagcgggtgacaatccgtacctgcggtataaccacgccgacgccgagtttcaggagcgtctgcaagaagatacgtcttttgggggcaacctcgggcgagcagtcttccaggccaagaagcgggttctcgaacctctcggtctggttgaggaaggcgctaagacggctcctggaaagaagagaccggtagagccatcaccccagcgttctccagactcctctacgggcatcggcaagaaaggccagcagcccgcgaaaaagagactcaactttgggcagactggcgactcagagtcagtgcccgaccctcaaccaatcggagaaccccccgcaggcccctctggtctgggatctggtacaatggctgcaggcggtggcgctccaatggcagacaataacgaaggcgccgacggagtgggtagttcctcaggaaattggcattgcgattccacatggctgggcgactgagtcatcaccaccagcacccgaacctgggccctccccacctacaacaaccacctctacaagcaaatctccaacgggacttcgggaggaagcaccaacgacaacacctacttcggctacagcaccccctgggggtattttgactttaacagattccactgccacttctcaccacgtgactggcagcgactcatcaacaacaactggggattccggcccaagagactcaacttcaagctcttcaacatccaggtcaaggaggtcacgcagaatgaaggcaccaagaccatcgccaataaccttaccagcacgattcaggtctttacggactcggaataccagctcccgtacgtcctcggctctgcgcaccagggctgcctgcctccgttcccggcggacgtcttcatgattcctcagtacgggtacctgactctgaacaatggcagtcaggccgtgggccgttcctccttctactgcctggagtactttccttctcaaatgctgagaacgggcaacaactttgagttcagctaccagtttgaggacgtgccttttcacagcagctacgcgcacagccaaagcctggaccggctgatgaaccccctcatcgaccagtacctgtactacctgtctcggactcagtccacgggaggtaccgcaggaactcagcagttgctattttctcaggccgggcctaataacatgtcggctcaggccaaaaactggctacccgggccctgctaccggcagtaacgcgtctccacgacactgtcgcaaaataacaacagcaactttgtctggaccggtgccaccaagtatcatctgaatggcagagactctctggtagatcccggtgtcgctatggcaacccacaaggacgacgaagagcgattttttccgtccagcggagtcataatgtttgggaaacagggagctggaaaagacaacgtggactatagcagcgtcatgctaaccagtgaggaagaaattaaaaccaccaacccagtggccacagaacagtacggcgtggtggccgataacctgcaacagcaaaacgccgctcctattgtaggggccgtcaacagtcaaggagccttacctggcatggtctggcagaaccgggacgtgtacctgcagggtcctacctgggccaagattcctcacacggacggaaactttcatccctcgccgctgatgggaggctttggactgaaacacccgcctcctcagatcctgattaagaatacacctgttcccgcggatcctccaactaccttcagtcaagctaagctggcgtcgttcatcacgcagtacagcaccggacaggtcagcgtggaaattgaatgggagctgcaggaagaaaacagcaaacgctggaacccagagattcaatacacttccaactactacaaatctacaaatgtggactttgctgttaacacagatggcacttattctgagcctcgccccatcggcacccgttacctcacccgtaatctgtaattgcttgttaatcaataaaccggttgattcgtttcagttgaactttggtctctgcgaagggcgaattc

SEQ ID NO: 29 - protein, 738 aa, Adeno-associated virus
MAADGYLPDWLEDNLSEGIREWWALKPGAPKPKANQQKQDDGRGLVLPGYKYLGPFNGLDKGEPVNAADAAALEHDKAYDQQLKAGDNPYLRYNHADAEFQERLQEDTSFGGNLGRAVFQAKKRVLEPLGLVEEGAKTAPGKKRPVEPSPQRSPDSSTGIGKKGQQPAKKRLNFGQTGDSESVPDPQPIGEPPAGPSGLGSGTMAAGGGAPMADNNEGADGVGSSSGNWHCDSTWLGDGVITTSTRTWALPTYNNHLYKQISNGTSGGSTNDNTYFGYSTPWGYFDFNRFHCHFSPRDWQRLINNNWGFRPKSLNFKLFNIQVKEVTQNEGTKTIANNLTSTIQVFTDSEYQLPYVLGSAHQGCLPPFPADVFMIPQYGYLTLNNGSQAVGRSSFYCLEYFPSQMLRTGNNFEFSYQFEDVPFHSSYAHSQSLDRLMNPLIDQYLYYLSRTQSTGGTAGTQQLLFSQAGPNNMSAQAKNWLPGPCYRQQRVSTTLSQNDNSNFAWTGATKYHLNGRDSLVNPGVAMATHKDDEERFFPSSGVLMFGKQGAGKDNVDYSSVMLTSEEEIKTTNPVATEQYGVVADNLQQQNAAPIVGAVNSQGALPGMVWQNRDVYLQGPIWAKIPHTDGNFHPSPLMGGFGLKHPPPQILIKNTPVPADPPTTFSQAKLASFITQYSTGQVSVEIEWELQKENSKRWNPEIQYTSNYYKSTNVDFAVNTDGTYSEPRPIGTRYLTRNL

SEQ ID NO: 30 - DNA, 3121 bp, Adeno-associated virus
gaattcgcccttcgcgagaccaaagttcaactgaaacgaatcaaccggtttattgattaacaagcaattacagattacgggtgaggtaacgggtgccgatggggcgaggctcagaataagtgccatctgtgttaacagcaaagtccacatttgtagatttgtagtagttggaagtgtattgaatctctgggttccagcgtttgctgttttctttctgcagctcccattcaatttccacgctgacctgtccggtgctgtactgcgtgatgaacgacgccagcttagcttgactgaaggtagttggaggatccgcgggaacaggtgtattcttaatcaggatctgaggaggcgggtgtttcagtccaaagcctcccatcagcggcgagggatgaaagtttccgtccgtgtgaggaatcttggcccagataggaccctgcaggtacacgtcccggttctgccagaccatgccaggtaaggctccttgactgttgacggcccctacaataggagcggcgttttgctgttgcaggttatcggccaccacgccgtactgttctgtggccactgggttggtggttttaatttcttcctcactggttagcataacgctgctatagtccacgttgtcttttccagctccctgtttcccaaacattaagactccgctggacggaaaaaatcgctcttcgtcgtccttgtgggttgccatagcgacaccgggatttaccagagagtctctgccattcagatgatacttggtggcaccggtccaggcaaagttgctgttgtcattttgcgacagtgtcgtggagacgcgttgctgccggtagcagggcccgggtagccagtttttggcctgagccgacatgttattaggcccggcctgagaaaatagcaactgctgagttcctgcggtacctcccgtggactgagtccgagacaggtagtacaggtactggtcgatgagggggttcatcagccggtccaggctttggctgtgcgcgtagctgctgtgaaaaggcacgtcctcaaactggtagctgaactcaaagttgttgcccgttctcagcatttgagaaggaaagtactccaggcagtagaaggaggaacggcccacggcctgactgccattgttcagagtcaggtacccgtactgaggaatcatgaagacgtccgccgggaacggaggcaggcagccctggtgcgcagagccgaggacgtacgggagctggtattccgagtccgtaaagacctgaatcgtgctggtaaggttattggcgatggtcttggtgccttcattctgcgtgacctccttgacctggatgttgaagagcttgaagttgaggctcttgggccggaatccccagttgttgttgatgagtcgctgccagtcacgtggtgagaagtggcagtggaatctgttaaagtcaaaatacccccagggggtgctgtagccgaagtaggtgttgtcgttggtgcttcctcccgaagtcccgttggagatttgcttgtagaggtggttgttgtaggtggggagggcccaggttcgggtgctggtggtgatgactccgtcgcccagccatgtggaatcgcaatgccaatttcctgaggaactacccactccgtcggcgccttcgttattgtctgccattggagcgccaccgcctgcagccattgtaccagatcccagaccagaggggcctgcggggggttctccgattggttgagggtcgggcactgactctgagtcgccagtctgcccaaagttgagtctctttttcgcgggctgctggcctttcttgccgatgcccgtagaggagtctggagaacgctggggtgatggctctaccggtctcttctttccaggagccgtcttagcgccttcctcaaccagaccgagaggttcgagaacccgcttcttggcctggaagactgctcgcccgaggttgcccccaaaagacgtatcttcttgcagacgctcctgaaactcggcgtcggcgtggttataccgcaggtacggattgtcacccgctttgagctgctggtcgtaggccttgtcgtgctcgagggccgctgcgtccgccgcgttgacgggctcccccttgtcgagtccgttgaagggtccgaggtacttgtagccaggaagcaccagaccccggccgtcgtcctgcttttgctggttggctttgggcttcggggctccaggtttcagcgcccaccactcgcgaatgccctcagagaggttgtcctcgagccaatctggaagataaccatcggcagccatacctgatttaaatcatttattgttcaaagatgcagtcatccaaatccacattgaccagatcgcaggcagtgcaagcgtctggcacctttcccatgatatgatgaatgtagcacagtttctgatacgcctttttgacgacagaaacgggttgagattctgacacgggaaagcactctaaacagtctttctgtccgtgagtgaagcagatatttgaattctgattcattctctcgcattgtctgcagggaaacagcatcagattcatgcccacgtgacgagaacatttgttttggtacctgtctgcgtagttgatcgaagcttccgcgtctgacgtcgatggctgcgcaactgactcgcgcacccgtttgggctcacttatatctgcgtcactgggggcgggtcttttcttggctccaccctttttgacgtagaattcatgctccacctcaaccacgtgatcctttgcccaccggaaaaagtctttgacttcctgcttggtgaccttcccaaagtcatgatccagacggcgggtgagttcaaatttgaacatccggtcttgcaacggctgctggtgttcgaaggtcgttgagttcccgtcaatcacggcgcacatgttggtgttggaggtgacgatcacgggagtcgggtctatctgggccgaggacttgcatttctggtccacgcgcaccttgcttcctccgagaatggctttggccgactccacgaccttggcggtcatcttcccctcctcccaccagatcaccatcttgtcgacacagtcgttgaagggaaagttctcattggtccagttgacgcagccgtagaaagggcgaattc

SEQ ID NO: 31 - DNA, 2211 bp, Adeno-associated virus
atggctgctgacggttatcttccagattggctcgaggacaacctttctgaaggcattcgtgagtggtgggctctgaaacctggagtccctcaacccaaagcgaaccaacaacaccaggacaaccgtcggggtcttgtgcttccgggttacaaatacctcggacccggtaacggactcgacaaaggagagccggtcaacgaggcggacgcggcagccctcgaacacgacaaagcttacgaccagcagctcaaggccggtgacaacccgtacctcaagtacaaccacgccgacgccgagtttcaggagcgtcttcaagaagatacgtcttttgggggcaaccttggcagagcagtcttccaggccaaaaagaggatccttgagcctcttggtctggttgaggaagcagctaaaacggctcctggaaagaagggggctgtagatcagtctcctcaggaaccggactcatcatctggtgttggcaaatcgggcaaacagcctgccagaaaaagactaaatttcggtcagactggagactcagagtcagtcccagaccctcaacctctcggagaaccaccagcagcccccacaagtttgggatctaatacaatggcttcaggcggtggcgcaccaatggcagacaataacgagggtgccgatggagtgggtaattcctcaggaaattggcattgcgattcccaatggctgggcgacagagtcatcaccaccagcaccagaacctgggccctgcccacttacaacaaccatctctacaagcaaatctccagccaatcaggagcttcaaacgacaaccactactttggctacagcaccccttgggggtattttgactttaacagattccactgccacttctcaccacgtgactggcagcgactcattaacaacaactggggattccggcccaagaaactcagcttcaagctcttcaacatccaagttagaggggtcacgcagaacgatggcacgacgactattgccaataaccttaccagcacggttcaagtgtttacggactcggagtatcagctcccgtacgtgctcgggtcggcgcaccaaggctgtctcccgccgtttccagcggacgtcttcatggtccctcagtatggatacctcaccctgaacaacggaagtcaagcggtgggacgctcatccttttactgcctggagtacttcccttcgcagatgctaaggactggaaataacttccaattcagctataccttcgaggatgtaccttttcacagcagctacgctcacagccagagtttggatcgcttgatgaatcctcttattgatcagtatctgtactacctgaacagaacgcaaggaacaacctctggaacaaccaaccaatcacggctgctttttagccaggctgggcctcagtctatgtctttgcaggccagaaattggctacctgggccctgctaccggcaacagagactttcaaagactgctaacgacaacaacaacagtaactttccttggacagcggccagcaaatatcatctcaatggccgcgactcgctggtgaatccaggaccagctatggccagtcacaaggacgatgaagaaaaatttttccctatgcacggcaatctaatatttggcaaagaagggacaacggcaagtaacgcagaattagataatgtaatgattacggatgaagaagagattcgtaccaccaatcctgtggcaacagagcagtatggaactgtggcaaataacttgcagagctcaaatacagctcccacgactggaactgtcaatcatcagggggccttacctggcatggtgtggcaagatcgtgacgtgtaccttcaaggacctatctgggcaaagattcctcacacggatggacactttcatccttctcctctgatgggaggctttggactgaaacatccgcctcctcaaatcatgatcaaaaatactccggtaccggcaaatcctccgacgactttcagcccggccaagtttgcttcatttatcactcagtactccactggacaggtcagcgtggaaattgagtgggagctacagaaagaaaacagcaaacgttggaatccagagattcagtacacttccaactacaacaagtctgttaatgtggactttactgtagacactaatggtgtttatagtgaacctcgccctattggaacccggtatctcacacgaaacttgtga

SEQ ID NO: 32 - protein, 736 aa, Adeno-associated virus 3
MAADGYLPDWLEDNLSEGIREWWALKPGVPQPKANQQHQDNRRGLVLPGYKYLGPGNGLDKGEPVNEADAAALEHDKAYDQQLKAGDNPYLKYNHADAEFQERLQEDTSFGGNLGRAVFQAKKRILEPLGLVEEAAKTAPGKKGAVDQSPQEPDSSSGVGKSGKQPARKRLNFGQTGDSESVPDPQPLGEPPAAPTSLGSNTMASGGGAPMADNNEGADGVGNSSGNWHCDSQWLGDRVITTSTRTWALPTYNNHLYKQISSQSGASNDNHYFGYSTPWGYFDFNRFHCHFSPRDWQRLINNNWGFRPKKLSFKLFNIQVRGVTQNDGTTTIANNLTSTVQVFTDSEYQLPYVLGSAHQGCLPPFPADVFMVPQYGYLTLNNGSQAVGRSSFYCLEYFPSQMLRTGNNFQFSYTFEDVPFHSSYAHSQSLDRLMNPLIDQYLYYLNRTQGTTSGTTNQSRLLFSQAGPQSMSLQARNWLPGPCYRQQRLSKTANDNNNSNFPWTAASKYHLNGRDSLVNPGPAMASHKDDEEKFFPMHGNLIFGKEGTTASNAELDNVMITDEEEIRTTNPVATEQYGTVANNLQSSNTAPTTGTVNHQGALPGMVWQDRDVYLQGPIWAKIPHTDGHFHPSPLMGGFGLKHPPPQIMIKNTPVPANPPTTFSPAKFASFITQYSTGQVSVEIEWELQKENSKRWNPEIQYTSNYNKSVNVDFTVDTNGVYSEPRPIGTRYLTRNL

SEQ ID NO: 33 - DNA, 4726 bp, Adeno-associated virus 3
ttggccactccctctatgcgcactcgctcgctcggtggggcctggcgaccaaaggtcgccagacggacgtgctttgcacgtccggccccaccgagcgagcgagtgcgcatagagggagtggccaactccatcactagaggtatggcagtgacgtaacgcgaagcgcgcgaagcgagaccacgcctaccagctgcgtcagcagtcaggtgacccttttgcgacagtttgcgacaccacgtggccgctgagggtatatattctcgagtgagcgaaccaggagctccattttgaccgcgaaatttgaacgagcagcagccatgccggggttctacgagattgtcctgaaggtcccgagtgacctggacgagcgcctgccgggcatttctaactcgtttgttaactgggtggccgagaaggaatgggacgtgccgccggattctgacatggatccgaatctgattgagcaggcacccctgaccgtggccgaaaagcttcagcgcgagttcctggtggagtggcgccgcgtgagtaaggccccggaggccctcttttttgtccagttcgaaaagggggagacctacttccacctgcacgtgctgattgagaccatcggggtcaaatccatggtggtcggccgctacgtgagccagattaaagagaagctggtgacccgcatctaccgcggggtcgagccgcagcttccgaactggttcgcggtgaccaaaacgcgaaatggcgccgggggcgggaacaaggtggtggacgactgctacatccccaactacctgctccccaagacccagcccgagctccagtgggcgtggactaacatggaccagtatttaagcgcctgtttgaatctcgcggagcgtaaacggctggtggcgcagcatctgacgcacgtgtcgcagacgcaggagcagaacaaagagaatcagaaccccaattctgacgcgccggtcatcaggtcaaaaacctcagccaggtacatggagctggtcgggtggctggtggaccgcgggatcacgtcagaaaagcaatggattcaggaggaccaggcctcgtacatctccttcaacgccgcctccaactcgcggtcccagatcaaggccgcgctggacaatgcctccaagatcatgagcctgacaaagacggctccggactacctggtgggcagcaacccgccggaggacattaccaaaaatcggatctaccaaatcctggagctgaacgggtacgatccgcagtacgcggcctccgtcttcctgggctgggcgcaaaagaagttcgggaagaggaacaccatctggctctttgggccggccacgacgggtaaaaccaacatcgcggaagccatcgcccacgccgtgcccttctacggctgcgtaaactggaccaatgagaactttcccttcaacgattgcgtcgacaagatggtgatctggtgggaggagggcaagatgacggccaaggtcgtggagagcgccaaggccattctgggcggaagcaaggtgcgcgtggaccaaaagtgcaagtcatcggcccagatcgaacccactcccgtgatcgtcacctccaacaccaacatgtgcgccgtgattgacgggaacagcaccaccttcgagcatcagcagccgctgcaggaccggatgtttgaatttgaacttacccgccgtttggaccatgactttgggaaggtcaccaaacaggaagtaaaggactttttccggtgggcttccgatcacgtgactgacgtggctcatgagttctacgtcagaaagggtggagctaagaaacgccccgcctccaatgacgcggatgtaagcgagccaaaacgggagtgcacgtcacttgcgcagccgacaacgtcagacgcggaagcaccggcggactacgcggacaggtaccaaaacaaatgttctcgtcacgtgggcatgaatctgatgctttttccctgtaaaacatgcgagagaatgaatcaaatttccaatgtctgttttacgcatggtcaaagagactgtggggaatgcttccctggaatgtcagaatctcaacccgtttctgtcgtcaaaaagaagacttatcagaaactgtgtccaattcatcatatcctgggaagggcacccgagattgcctgttcggcctgcgatttggccaatgtggacttggatgactgtgtttctgagcaataaatgacttaaaccaggtatggctgctgacggttatcttccagattggctcgaggacaacctttctgaaggcattcgtgagtggtgggctctgaaacctggagtccctcaacccaaagcgaaccaacaacaccaggacaaccgtcggggtcttgtgcttccgggttacaaatacctcggacccggtaacggactcgacaaaggagagccggtcaacgaggcggacgcggcagccctcgaacacgacaaagcttacgaccagcagctcaaggccggtgacaacccgtacctcaagtacaaccacgccgacgccgagtttcaggagcgtcttcaagaagatacgtcttttgggggcaaccttggcagagcagtcttccaggccaaaaagaggatccttgagcctcttggtctggttgaggaagcagctaaaacggctcctggaaagaagggggctgtagatcagtctcctcaggaaccggactcatcatctggtgttggcaaatcgggcaaacagcctgccagaaaaagactaaatttcggtcagactggagactcagagtcagtcccagaccctcaacctctcggagaaccaccagcagcccccacaagtttgggatctaatacaatggcttcaggcggtggcgcaccaatggcagacaataacgagggtgccgatggagtgggtaattcctcaggaaattggcattgcgattcccaatggctgggcgacagagtcatcaccaccagcaccagaacctgggccctgcccacttacaacaaccatctctacaagcaaatctccagccaatcaggagcttcaaacgacaaccactactttggctacagcaccccttgggggtattttgactttaacagattccactgccacttctcaccacgtgactggcagcgactcattaacaacaactggggattccggcccaagaaactcagcttcaagctcttcaacatccaagttagaggggtcacgcagaacgatggcacgacgactattgccaataaccttaccagcacggttcaagtgtttacggactcggagtatcagctcccgtacgtgctcgggtcggcgcaccaaggctgtctcccgccgtttccagcggacgtcttcatggtccctcagtatggatacctcaccctgaacaacggaagtcaagcggtgggacgctcatccttttactgcctggagtacttcccttcgcagatgctaaggactggaaataacttccaattcagctataccttcgaggatgtaccttttcacagcagctacgctcacagccagagtttggatcgcttgatgaatcctcttattgatcagtatctgtactacctgaacagaacgcaaggaacaacctctggaacaaccaaccaatcacggctgctttttagccaggctgggcctcagtctatgtctttgcaggccagaaattggctacctgggccctgctaccggcaacagagactttcaaagactgctaacgacaacaacaacagtaactttccttggacagcggccagcaaatatcatctcaatggccgcgactcgctggtgaatccaggaccagctatggccagtcacaaggacgatgaagaaaaatttttccctatgcacggcaatctaatatttggcaaagaagggacaacggcaagtaacgcagaattagataatgtaatgattacggatgaagaagagattcgtaccaccaatcctgtggcaacagagcagtatggaactgtggcaaataacttgcagagctcaaatacagctcccacgactggaactgtcaatcatcagggggccttacctggcatggtgtggcaagatcgtgacgtgtaccttcaaggacctatctgggcaaagattcctcacacggatggacactttcatccttctcctctgatgggaggctttggactgaaacatccgcctcctcaaatcatgatcaaaaatactccggtaccggcaaatcctccgacgactttcagcccggccaagtttgcttcatttatcactcagtactccactggacaggtcagcgtggaaattgagtgggagctacagaaagaaaacagcaaacgttggaatccagagattcagtacacttccaactacaacaagtctgttaatgtggactttactgtagacactaatggtgtttatagtgaacctcgccctattggaacccggtatctcacacgaaacttgtgaatcctggttaatcaataaaccgtttaattcgtttcagttgaactttggctcttgtgcacttctttatctttatcttgtttccatggctactgcgtagataagcagcggcctgcggcgcttgcgcttcgcggtttacaactgctggttaatatttaactctcgccatacctctagtgatggagttggccactccctctatgcgcactcgctcgctcggtggggcctggcgaccaaaggtcgccagacggacgtgctttgcacgtccggccccaccgagcgagcgagtgcgcatagagggagtggccaa

SEQ ID NO: 34 - protein, 737 aa, Adeno-associated virus
MAADGYLPDWLEDNLSEGIREWWDLKPGAPKPKANQQKQDNGRGLVLPGYKYLGPFNGLDKGEPVNAADAAALEHDKAYDQQLNAGDNPYLRYNHADAEFQERLQEDTSFGGNLGRAVFQAKKRVLEPLGLVEEGAKTAPAKKRPVEPSPQRSPDSSTGIGKKGQQPARKRLNFGQTGDSESVPDPQPLGEPPAAPSSVGSGTVAAGGGAPMADNNEGADGVGNASGNWHCDSTWLGDRVITTSTRTWALPTYNNHLYEQISSETAGSTNDNTYFGYSTPWGYFDFNRFHCHFSPRDWQRLINNNWGFRPKKLRFKLFNIQVKEVTTNDGVTTIANNLTSTIQVFSDSEYQLPYVLGSAHQGCLPPFPADVFMIPQYGYLTLNNGSQSVGRSSFYCLEYFPSQMLRTGNNFEFSYSFEDVPFHSSYAHSQSLDRLMNPLIDQYLYYLARTQSDPGGTAGNRELQFYQGGPSTMAEQAKNWLPGPCFRQQRVSKTLDQNNNSNFAWTGATKYHLNGRNSLVNPGVAMATHKDDEDRFFPSSGVLIFGKTGATNKTTLENVLMTNEEEIRPTNPVATEEYGIVSSNLQAANTAAQTQVVNNQGALPGMVWQNRDVYLQGPIWAKIPHTDGNFHPSPLMGGFGLKHPPPQILIKNTPVPANPPEVFTPAKFASFITQYSTGQVSVEIEWELQKENSKRWDPEIQYTSNFEKQTGVDFAVDSQGVYSEPRPIGTRYLTRNL

SEQ ID NO: 35 - DNA, 2211 bp, Adeno-associated virus
atggctgctgacggttatcttccagattggctcgaggacaacctttctgaaggcattcgtgagtggtgggctctgaaacctggagtccctcaacccaaagcgaaccaacaacaccaggacaaccgtcggggtcttgtgcttccgggttacaaatacctcggacccggtaacggactcgacaaaggagagccggtcaacgaggcggacgcggcagccctcgaacacgacaaagcttacgaccagcagctcaaggccggtgacaacccgtacctcaagtacaaccacgccgacgccgagtttcaggagcgtcttcaagaagatacgtcttttgggggcaaccttggcagagcagtcttccaggccaaaaagaggatccttgagcctcttggtctggttgaggaagcagctaaaacggctcctggaaagaagggggctgtagatcagtctcctcaggaaccggactcatcatctggtgttggcaaatcgggcaaacagcctgccagaaaaagactaaatttcggtcagactggagactcagagtcagtcccagaccctcaacctctcggagaaccaccagcagcccccacaagtttgggatctaatacaatggcttcaggcggtggcgcaccaatggcagacaataacgagggtgccgatggagtgggtaattcctcaggaaattggcattgcgattcccaatggctgggcgacagagtcatcaccaccagcaccagaacctgggccctgcccacttacaacaaccatctctacaagcaaatctccagccaatcaggagcttcaaacgacaaccactactttggctacagcaccccttgggggtattttgactttaacagattccactgccacttctcaccacgtgactggcagcgactcattaacaacaactggggattccggcccaagaaactcagcttcaagctcttcaacatccaagttagaggggtcacgcagaacgatggcacgacgactattgccaataaccttaccagcacggttcaagtgtttacggactcggagtatcagctcccgtacgtgctcgggtcggcgcaccaaggctgtctcccgccgtttccagcggacgtcttcatggtccctcagtatggatacctcaccctgaacaacggaagtcaagcggtgggacgctcatccttttactgcctggagtacttcccttcgcagatgctaaggactggaaataacttccaattcagctataccttcgaggatgtaccttttcacagcagctacgctcacagccagagtttggatcgcttgatgaatcctcttattgatcagtatctgtactacctgaacagaacgcaaggaacaacctctggaacaaccaaccaatcacggctgctttttagccaggctgggcctcagtctatgtctttgcaggccagaaattggctacctgggccctgctaccggcaacagagactttcaaagactgctaacgacaacaacaacagtaactttccttggacagcggccagcaaatatcatctcaatggccgcgactcgctggtgaatccaggaccagctatggccagtcacaaggacgatgaagaaaaatttttccctatgcacggcaatctaatatttggcaaagaagggacaacggcaagtaacgcagaattagataatgtaatgattacggatgaagaagagattcgtaccaccaatcctgtggcaacagagcagtatggaactgtggcaaataacttgcagagctcaaatacagctcccacgactggaactgtcaatcatcagggggccttacctggcatggtgtggcaagatcgtgacgtgtaccttcaaggacctatctgggcaaagattcctcacacggatggacactttcatccttctcctctgatgggaggctttggactgaaacatccgcctcctcaaatcatgatcaaaaatactccggtaccggcaaatcctccgacgactttcagcccggccaagtttgcttcatttatcactcagtactccactggacaggtcagcgtggaaattgagtgggagctacagaaagaaaacagcaaacgttggaatccagagattcagtacacttccaactacaacaagtctgttaatgtggactttactgtagacactaatggtgtttatagtgaacctcgccctattggaacccggtatctcacacgaaacttgtaa

SEQ ID NO: 36 - protein, 736 aa, Adeno-associated virus; identical to SEQ ID NO: 32

SEQ ID NO: 37 - protein, 736 aa, Adeno-associated virus 3A; identical to SEQ ID NO: 32

SEQ ID NO: 38 - protein, 624 aa, Adeno-associated virus 3A
MPGFYEIVLKVPSDLDERLPGISNSFVNWVAEKEWDVPPDSDMDPNLIEQAPLTVAEKLQREFLVEWRRVSKAPEALFFVQFEKGETYFHLHVLIETIGVKSMVVGRYVSQIKEKLVTRIYRGVEPQLPNWFAVTKTRNGAGGGNKVVDDCYIPNYLLPKTQPELQWAWTNMDQYLSACLNLAERKRLVAQHLTHVSQTQEQNKENQNPNSDAPVIRSKTSARYMELVGWLVDRGITSEKQWIQEDQASYISFNAASNSRSQIKAALDNASKIMSLTKTAPDYLVGSNPPEDITKNRIYQILELNGYDPQYAASVFLGWAQKKFGKRNTIWLFGPATTGKTNIAEAIAHAVPFYGCVNWTNENFPFNDCVDKMVIWWEEGKMTAKVVESAKAILGGSKVRVDQKCKSSAQIEPTPVIVTSNTNMCAVIDGNSTTFEHQQPLQDRMFEFELTRRLDHDFGKVTKQEVKDFFRWASDHVTDVAHEFYVRKGGAKKRPASNDADVSEPKRECTSLAQPTTSDAEAPADYADRYQNKCSRHVGMNLMLFPCKTCERMNQISNVCFTHGQRDCGECFPGMSESQPVSVVKKKTYQKLCPIHHILGRAPEIACSACDLANVDLDDCVSEQ

SEQ ID NO: 39 - protein, 736 aa, Adeno-associated virus 3B
MAADGYLPDWLEDNLSEGIREWWALKPGVPQPKANQQHQDNRRGLVLPGYKYLGPGNGLDKGEPVNEADAAALEHDKAYDQQLKAGDNPYLKYNHADAEFQERLQEDTSFGGNLGRAVFQAKKRILEPLGLVEEAAKTAPGKKRPVDQSPQEPDSSSGVGKSGKQPARKRLNFGQTGDSESVPDPQPLGEPPAAPTSLGSNTMASGGGAPMADNNEGADGVGNSSGNWHCDSQWLGDRVITTSTRTWALPTYNNHLYKQISSQSGASNDNHYFGYSTPWGYFDFNRFHCHFSPRDWQRLINNNWGFRPKKLSFKLFNIQVKEVTQNDGTTTIANNLTSTVQVFTDSEYQLPYVLGSAHQGCLPPFPADVFMVPQYGYLTLNNGSQAVGRSSFYCLEYFPSQMLRTGNNFQFSYTFEDVPFHSSYAHSQSLDRLMNPLIDQYLYYLNRTQGTTSGTTNQSRLLFSQAGPQSMSLQARNWLPGPCYRQQRLSKTANDNNNSNFPWTAASKYHLNGRDSLVNPGPAMASHKDDEEKFFPMHGNLIFGKEGTTASNAELDNVMITDEEEIRTTNPVATEQYGTVANNLQSSNTAPTTRTVNDQGALPGMVWQDRDVYLQGPIWAKIPHTDGHFHPSPLMGGFGLKHPPPQIMIKNTPVPANPPTTFSPAKFASFITQYSTGQVSVEIEWELQKENSKRWNPEIQYTSNYNKSVNVDFTVDTNGVYSEPRPIGTRYLTRNL

SEQ ID NO: 40 - protein, 624 aa, Adeno-associated virus 3B
MPGFYEIVLKVPSDLDEHLPGISNSFVNWVAEKEWELPPDSDMDPNLIEQAPLTVAEKLQREFLVEWRRVSKAPEALFFVQFEKGETYFHLHVLIETIGVKSMVVGRYVSQIKEKLVTRIYRGVEPQLPNWFAVTKTRNGAGGGNKVVDDCYIPNYLLPKTQPELQWAWTNMDQYLSACLNLAERKRLVAQHLTHVSQTQEQNKENQNPNSDAPVIRSKTSARYMELVGWLVDRGITSEKQWIQEDQASYISFNAASNSRSQIKAALDNASKIMSLTKTAPDYLVGSNPPEDITKNRIYQILELNGYDPQYAASVFLGWAQKKFGKRNTIWLFGPATTGKTNIAEAIAHAVPFYGCVNWTNENFPFNDCVDKMVIWWEEGKMTAKVVESAKAILGGSKVRVDQKCKSSAQIEPTPVIVTSNTNMCAVIDGNSTTFEHQQPLQDRMFKFELTRRLDHDFGKVTKQEVKDFFRWASDHVTDVAHEFYVRKGGAKKRPASNDADVSEPKRQCTSLAQPTTSDAEAPADYADRYQNKCSRHVGMNLMLFPCKTCERMNQISNVCFTHGQRDCGECFPGMSESQPVSVVKKKTYQKLCPIHHILGRAPEIACSACDLANVDLDDCVSEQ

SEQ ID NO: 41 - DNA, 4722 bp, Adeno-associated virus 3B
tggccactccctctatgcgcactcgctcgctcggtggggcctggcgaccaaaggtcgccagacggacgtgctttgcacgtccggccccaccgagcgagcgagtgcgcatagagggagtggccaactccatcactagaggtatggcagtgacgtaacgcgaagcgcgcgaagcgagaccacgcctaccagctgcgtcagcagtcaggtgacccttttgcgacagtttgcgacaccacgtggccgctgagggtatatattctcgagtgagcgaaccaggagctccattttgaccgcgaaatttgaacgagcagcagccatgccggggttctacgagattgtcctgaaggtcccgagtgacctggacgagcacctgccgggcatttctaactcgtttgttaactgggtggccgagaaggaatgggagctgccgccggattctgacatggatccgaatctgattgagcaggcacccctgaccgtggccgaaaagcttcagcgcgagttcctggtggagtggcgccgcgtgagtaaggccccggaggccctcttttttgtccagttcgaaaagggggagacctacttccacctgcacgtgctgattgagaccatcggggtcaaatccatggtggtcggccgctacgtgagccagattaaagagaagctggtgacccgcatctaccgcggggtcgagccgcagcttccgaactggttcgcggtgaccaaaacgcgaaatggcgccgggggcgggaacaaggtggtggacgactgctacatccccaactacctgctccccaagacccagcccgagctccagtgggcgtggactaacatggaccagtatttaagcgcctgtttgaatctcgcggagcgtaaacggctggtggcgcagcatctgacgcacgtgtcgcagacgcaggagcagaacaaagagaatcagaaccccaattctgacgcgccggtcatcaggtcaaaaacctcagccaggtacatggagctggtcgggtggctggtggaccgcgggatcacgtcagaaaagcaatggattcaggaggaccaggcctcgtacatctccttcaacgccgcctccaactcgcggtcccagatcaaggccgcgctggacaatgcctccaagatcatgagcctgacaaagacggctccggactacctggtgggcagcaacccgccggaggacattaccaaaaatcggatctaccaaatcctggagctgaacgggtacgatccgcagtacgcggcctccgtcttcctgggctgggcgcaaaagaagttcgggaagaggaacaccatctggctctttgggccggccacgacgggtaaaaccaacatcgcggaagccatcgcccacgccgtgcccttctacggctgcgtaaactggaccaatgagaactttcccttcaacgattgcgtcgacaagatggtgatctggtgggaggagggcaagatgacggccaaggtcgtggagagcgccaaggccattctgggcggaagcaaggtgcgcgtggaccaaaagtgcaagtcatcggcccagatcgaacccactcccgtgatcgtcacctccaacaccaacatgtgcgccgtgattgacgggaacagcaccaccttcgagcatcagcagccgctgcaggaccggatgtttaaatttgaacttacccgccgtttggaccatgactttgggaaggtcaccaaacaggaagtaaaggactttttccggtgggcttccgatcacgtgactgacgtggctcatgagttctacgtcagaaagggtggagctaagaaacgccccgcctccaatgacgcggatgtaagcgagccaaaacggcagtgcacgtcacttgcgcagccgacaacgtcagacgcggaagcaccggcggactacgcggacaggtaccaaaacaaatgttctcgtcacgtgggcatgaatctgatgctttttccctgtaaaacatgcgagagaatgaatcaaatttccaatgtctgttttacgcatggtcaaagagactgtggggaatgcttccctggaatgtcagaatctcaacccgtttctgtcgtcaaaaagaagacttatcagaaactgtgtccaattcatcatatcctgggaagggcacccgagattgcctgttcggcctgcgatttggccaatgtggacttggatgactgtgtttctgagcaataaatgacttaaaccaggtatggctgctgacggttatcttccagattggctcgaggacaacctttctgaaggcattcgtgagtggtgggctctgaaacctggagtccctcaacccaaagcgaaccaacaacaccaggacaaccgtcggggtcttgtgcttccgggttacaaatacctcggacccggtaacggactcgacaaaggagagccggtcaacgaggcggacgcggcagccctcgaacacgacaaagcttacgaccagcagctcaaggccggtgacaacccgtacctcaagtacaaccacgccgacgccgagtttcaggagcgtcttcaagaagatacgtcttttgggggcaaccttggcagagcagtcttccaggccaaaaagaggatccttgagcctcttggtctggttgaggaagcagctaaaacggctcctggaaagaagaggcctgtagatcagtctcctcaggaaccggactcatcatctggtgttggcaaatcgggcaaacagcctgccagaaaaagactaaatttcggtcagactggcgactcagagtcagtcccagaccctcaacctctcggagaaccaccagcagcccccacaagtttgggatctaatacaatggcttcaggcggtggcgcaccaatggcagacaataacgagggtgccgatggagtgggtaattcctcaggaaattggcattgcgattcccaatggctgggcgacagagtcatcaccaccagcaccagaacctgggccctgcccacttacaacaaccatctctacaagcaaatctccagccaatcaggagcttcaaacgacaaccactactttggctacagcaccccttgggggtattttgactttaacagattccactgccacttctcaccacgtgactggcagcgactcattaacaacaactggggattccggcccaagaaactcagcttcaagctcttcaacatccaagttaaagaggtcacgcagaacgatggcacgacgactattgccaataaccttaccagcacggttcaagtgtttacggactcggagtatcagctcccgtacgtgctcgggtcggcgcaccaaggctgtctcccgccgtttccagcggacgtcttcatggtccctcagtatggatacctcaccctgaacaacggaagtcaagcggtgggacgctcatccttttactgcctggagtacttcccttcgcagatgctaaggactggaaataacttccaattcagctataccttcgaggatgtaccttttcacagcagctacgctcacagccagagtttggatcgcttgatgaatcctcttattgatcagtatctgtactacctgaacagaacgcaaggaacaacctctggaacaaccaaccaatcacggctgctttttagccaggctgggcctcagtctatgtctttgcaggccagaaattggctacctgggccctgctaccggcaacagagactttcaaagactgctaacgacaacaacaacagtaactttccttggacagcggccagcaaatatcatctcaatggccgcgactcgctggtgaatccaggaccagctatggccagtcacaaggacgatgaagaaaaatttttccctatgcacggcaatctaatatttggcaaagaagggacaacggcaagtaacgcagaattagataatgtaatgattacggatgaagaagagattcgtaccaccaatcctgtggcaacagagcagtatggaactgtggcaaataacttgcagagctcaaatacagctcccacgactagaactgtcaatgatcagggggccttacctggcatggtgtggcaagatcgtgacgtgtaccttcaaggacctatctgggcaaagattcctcacacggatggacactttcatccttctcctctgatgggaggctttggactgaaacatccgcctcctcaaatcatgatcaaaaatactccggtaccggcaaatcctccgacgactttcagcccggccaagtttgcttcatttatcactcagtactccactggacaggtcagcgtggaaattgagtgggagctacagaaagaaaacagcaaacgttggaatccagagattcagtacacttccaactacaacaagtctgttaatgtggactttactgtagacactaatggtgtttatagtgaacctcgccctattggaacccggtatctcacacgaaacttgtaatcctggttaatcaataaaccgtttaattcgtttcagttgaactttggctcttgtgcacttcttatcttatcttgtttccatggctactgcgtagataagcagcggcctgcggcgcttgcgcttcgcggtttacaactgctggttaatatttaactctcgccatacctctagtgatggagttggccactccctctatgcgcactcgctcgctcggtggggccggacgtgcaaagcacgtccgtctggcgacctttggtcgccaggccccaccgagcgagcgagtgcgcatagagggagtggccaa

SEQ ID NO: 42 - DNA, 1800 bp, Adeno-associated virus 4
  modified_base (342)..(342): n = a, c, t, or g
  misc_feature (342)..(342): n is a, c, g, or t
acggctcctggaaagaagagaccgttgattgaatccccccagcagcccgactcctccacgggtatcggcaaaaaaggcaagcagccggctaaaaagaagctcgttttcgaagacgaaactggagcaggcgacggaccccctgagggatcaacttccggagccatgtctgatgacagtgagatgcgtgcagcagctggcggagctgcagtcgagggsggacaaggtgccgatggagtgggtaatgcctcgggtgattggcattgcgattccacctggtctgagggccacgtcacgaccaccagcaccagaacctgggtcttgcccacctacaacaaccacctntacaagcgactcggagagagcctgcagtccaacacctacaacggattctccaccccctggggatactttgacttcaaccgcttccactgccacttctcaccacgtgactggcagcgactcatcaacaacaactggggcatgcgacccaaagccatgcgggtcaaaatcttcaacatccaggtcaaggaggtcacgacgtcgaacggcgagacaacggtggctaataaccttaccagcacggttcagatctttgcggactcgtcgtacgaactgccgtacgtgatggatgcgggtcaagagggcagcctgcctccttttcccaacgacgtctttatggtgccccagtacggctactgtggactggtgaccggcaacacttcgcagcaacagactgacagaaatgccttctactgcctggagtactttccttcgcagatgctgcggactggcaacaactttgaaattacgtacagttttgagaaggtgcctttccactcgatgtacgcgcacagccagagcctggaccggctgatgaaccctctcatcgaccagtacctgtggggactgcaatcgaccaccaccggaaccaccctgaatgccgggactgccaccaccaactttaccaagctgcggcctaccaacttttccaactttaaaaagaactggctgcccgggccttcaatcaagcagcagggcttctcaaagactgccaatcaaaactacaagatccctgccaccgggtcagacagtctcatcaaatacgagacgcacagcactctggacggaagatggagtgccctgacccccggacctccaatggccacggctggacctgcggacagcaagttcagcaacagccagctcatctttgcggggcctaaacagaacggcaacacggccaccgtacccgggactctgatcttcacctctgaggaggagctggcagccaccaacgccaccgatacggacatgtggggcaacctacctggcggtgaccagagcaacagcaacctgccgaccgtggacagactgacagccttgggagccgtgcctggaatggtctggcaaaacagagacatttactaccagggtcccatttgggccaagattcctcataccgatggacactttcacccctcaccgctgattggtgggtttgggctgaaacacccgcctcctcaaatttttatcaagaacaccccggtacctgcgaatcctgcaacgaccttcagctctactccggtaaactccttcattactcagtacagcactggccaggtgtcggtgcagattgactgggagatccagaaggagcggtccaaacgctggaaccccgaggtccagtttacctccaactacggacagcaaaactctctgttgtgggctcccgatgcggctgggaaatacactgagcctagggctatcggtacccgctacctcacccaccacctgtaataa

SEQ ID NO: 43 - DNA, 2208 bp, Adeno-associated virus 4
  modified_base (750)..(750): n = a, c, t, or g
  misc_feature (750)..(750): n is a, c, g, or t
atgactgacggttaccttccagattggctagaggacaacctctctgaaggcgttcgagagtggtgggcgctgcaacctggagcccctaaacccaaggcaaatcaacaacatcaggacaacgctcggggtcttgtgcttccgggttacaaatacctcggacccggcaacggactcgacaagggggaacccgtcaacgcagcggacgcggcagccctcgagcacgacaaggcctacgaccagcagctcaaggccggtgacaacccctacctcaagtacaaccacgccgacgcggagttccagcagcggcttcagggcgacacatcgtttgggggcaacctcggcagagcagtcttccaggccaaaaagagggttcttgaacctcttggtctggttgagcaagcgggtgagacggctcctggaaagaagagaccgttgattgaatccccccagcagcccgactcctccacgggtatcggcaaaaaaggcaagcagccggctaaaaagaagctcgttttcgaagacgaaactggagcaggcgacggaccccctgagggatcaacttccggagccatgtctgatgacagtgagatgcgtgcagcagctggcggagctgcagtcgagggsggacaaggtgccgatggagtgggtaatgcctcgggtgattggcattgcgattccacctggtctgagggccacgtcacgaccaccagcaccagaacctgggtcttgcccacctacaacaaccacctntacaagcgactcggagagagcctgcagtccaacacctacaacggattctccaccccctggggatactttgacttcaaccgcttccactgccacttctcaccacgtgactggcagcgactcatcaacaacaactggggcatgcgacccaaagccatgcgggtcaaaatcttcaacatccaggtcaaggaggtcacgacgtcgaacggcgagacaacggtggctaataaccttaccagcacggttcagatctttgcggactcgtcgtacgaactgccgtacgtgatggatgcgggtcaagagggcagcctgcctccttttcccaacgacgtctttatggtgccccagtacggctactgtggactggtgaccggcaacacttcgcagcaacagactgacagaaatgccttctactgcctggagtactttccttcgcagatgctgcggactggcaacaactttgaaattacgtacagttttgagaaggtgcctttccactcgatgtacgcgcacagccagagcctggaccggctgatgaaccctctcatcgaccagtacctgtggggactgcaatcgaccaccaccggaaccaccctgaatgccgggactgccaccaccaactttaccaagctgcggcctaccaacttttccaactttaaaaagaactggctgcccgggccttcaatcaagcagcagggcttctcaaagactgccaatcaaaactacaagatccctgccaccgggtcagacagtctcatcaaatacgagacgcacagcactctggacggaagatggagtgccctgacccccggacctccaatggccacggctggacctgcggacagcaagttcagcaacagccagctcatctttgcggggcctaaacagaacggcaacacggccaccgtacccgggactctgatcttcacctctgaggaggagctggcagccaccaacgccaccgatacggacatgtggggcaacctacctggcggtgaccagagcaacagcaacctgccgaccgtggacagactgacagccttgggagccgtgcctggaatggtctggcaaaacagagacatttactaccagggtcccatttgggccaagattcctcataccgatggacactttcacccctcaccgctgattggtgggtttgggctgaaacacccgcctcctcaaatttttatcaagaacaccccggtacctgcgaatcctgcaacgaccttcagctctactccggtaaactccttcattactcagtacagcactggccaggtgtcggtgcagattgactgggagatccagaaggagcggtccaaacgctggaaccccgaggtccagtttacctccaactacggacagcaaaactctctgttgtgggctcccgatgcggctgggaaatacactgagcctagggctatcggtacccgctacctcacccaccacctgtaataa

SEQ ID NO: 44 - DNA, 1872 bp, Adeno-associated virus 4
atgccggggttctacgagatcgtgctgaaggtgcccagcgacctggacgagcacctgcccggcatttctgactcttttgtgagctgggtggccgagaaggaatgggagctgccgccggattctgacatggacttgaatctgattgagcaggcacccctgaccgtggccgaaaagctgcaacgcgagttcctggtcgagtggcgccgcgtgagtaaggccccggaggccctcttctttgtccagttcgagaagggggacagctacttccacctgcacatcctggtggagaccgtgggcgtcaaatccatggtggtgggccgctacgtgagccagattaaagagaagctggtgacccgcatctaccgcggggtcgagccgcagcttccgaactggttcgcggtgaccaagacgcgtaatggcgccggaggcgggaacaaggtggtggacgactgctacatccccaactacctgctccccaagacccagcccgagctccagtgggcgtggactaacatggaccagtatataagcgcctgtttgaatctcgcggagcgtaaacggctggtggcgcagcatctgacgcacgtgtcgcagacgcaggagcagaacaaggaaaaccagaaccccaattctgacgcgccggtcatcaggtcaaaaacctccgccaggtacatggagctggtcgggtggctggtggaccgcgggatcacgtcagaaaagcaatggatccaggaggaccaggcgtcctacatctccttcaacgccgcctccaactcgcggtcacaaatcaaggccgcgctggacaatgcctccaaaatcatgagcctgacaaagacggctccggactacctggtgggccagaacccgccggaggacatttccagcaaccgcatctaccgaatcctcgagatgaacgggtacgatccgcagtacgcggcctccgtcttcctgggctgggcgcaaaagaagttcgggaagaggaacaccatctggctctttgggccggccacgacgggtaaaaccaacatcgcggaagccatcgcccacgccgtgcccttctacggctgcgtgaactggaccaatgagaactttccgttcaacgattgcgtcgacaagatggtgatctggtgggaggagggcaagatgacggccaaggtcgtagagagcgccaaggccatcctgggcggaagcaaggtgcgcgtggaccaaaagtgcaagtcatcggcccagatcgacccaactcccgtgatcgtcacctccaacaccaacatgtgcgcggtcatcgacggaaactcgaccaccttcgagcaccaacaaccactccaggaccggatgttcaagttcgagctcaccaagcgcctggagcacgactttggcaaggtcaccaagcaggaagtcaaagactttttccggtgggcgtcagatcacgtgaccgaggtgactcacgagttttacgtcagaaagggtggagctagaaagaggcccgcccccaatgacgcagatataagtgagcccaagcgggcctgtccgtcagttgcgcagccatcgacgtcagacgcggaagctccggtggactacgcggacaggtaccaaaacaaatgttctcgtcacgtgggtatgaatctgatgctttttccctgccggcaatgcgagagaatgaatcagaatgtggacatttgcttcacgcacggggtcatggactgtgccgagtgcttccccgtgtcagaatctcaacccgtgtctgtcgtcagaaagcggacgtatcagaaactgtgtccgattcatcacatcatggggagggcgcccgaggtggcctgctcggcctgcgaactggccaatgtggacttggatgactgtgacatggaacaataa

SEQ ID NO: 45 - DNA, 1611 bp, Adeno-associated virus 4
atgccggggttctacgagatcgtgctgaaggtgcccagcgacctggacgagcacctgcccggcatttctgactcttttgtgagctgggtggccgagaaggaatgggagctgccgccggattctgacatggacttgaatctgattgagcaggcacccctgaccgtggccgaaaagctgcaacgcgagttcctggtcgagtggcgccgcgtgagtaaggccccggaggccctcttctttgtccagttcgagaagggggacagctacttccacctgcacatcctggtggagaccgtgggcgtcaaatccatggtggtgggccgctacgtgagccagattaaagagaagctggtgacccgcatctaccgcggggtcgagccgcagcttccgaactggttcgcggtgaccaagacgcgtaatggcgccggaggcgggaacaaggtggtggacgactgctacatccccaactacctgctccccaagacccagcccgagctccagtgggcgtggactaacatggaccagtatataagcgcctgtttgaatctcgcggagcgtaaacggctggtggcgcagcatctgacgcacgtgtcgcagacgcaggagcagaacaaggaaaaccagaaccccaattctgacgcgccggtcatcaggtcaaaaacctccgccaggtacatggagctggtcgggtggctggtggaccgcgggatcacgtcagaaaagcaatggatccaggaggaccaggcgtcctacatctccttcaacgccgcctccaactcgcggtcacaaatcaaggccgcgctggacaatgcctccaaaatcatgagcctgacaaagacggctccggactacctggtgggccagaacccgccggaggacatttccagcaaccgcatctaccgaatcctcgagatgaacgggtacgatccgcagtacgcggcctccgtcttcctgggctgggcgcaaaagaagttcgggaagaggaacaccatctggctctttgggccggccacgacgggtaaaaccaacatcgcggaagccatcgcccacgccgtgcccttctacggctgcgtgaactggaccaatgagaactttccgttcaacgattgcgtcgacaagatggtgatctggtgggaggagggcaagatgacggccaaggtcgtagagagcgccaaggccatcctgggcggaagcaaggtgcgcgtggaccaaaagtgcaagtcatcggcccagatcgacccaactcccgtgatcgtcacctccaacaccaacatgtgcgcggtcatcgacggaaactcgaccaccttcgagcaccaacaaccactccaggaccggatgttcaagttcgagctcaccaagcgcctggagcacgactttggcaaggtcaccaagcaggaagtcaaagactttttccggtgggcgtcagatcacgtgaccgaggtgactcacgagttttacgtcagaaagggtggagctagaaagaggcccgcccccaatgacgcagatataagtgagcccaagcgggcctgtccgtcagttgcgcagccatcgacgtcagacgcggaagctccggtggactacgcggacagattggctagaggacaacctctctga

SEQ ID NO: 46 - DNA, 1872 bp, Adeno-associated virus 4; identical to SEQ ID NO: 44

SEQ ID NO: 47 - DNA, 1617 bp, Adeno-associated virus 4
  modified_base (162)..(162): n = a, c, t, or g
  misc_feature (162)..(162): n is a, c, g, or t
atgcgtgcagcagctggcggagctgcagtcgagggsggacaaggtgccgatggagtgggtaatgcctcgggtgattggcattgcgattccacctggtctgagggccacgtcacgaccaccagcaccagaacctgggtcttgcccacctacaacaaccacctntacaagcgactcggagagagcctgcagtccaacacctacaacggattctccaccccctggggatactttgacttcaaccgcttccactgccacttctcaccacgtgactggcagcgactcatcaacaacaactggggcatgcgacccaaagccatgcgggtcaaaatcttcaacatccaggtcaaggaggtcacgacgtcgaacggcgagacaacggtggctaataaccttaccagcacggttcagatctttgcggactcgtcgtacgaactgccgtacgtgatggatgcgggtcaagagggcagcctgcctccttttcccaacgacgtctttatggtgccccagtacggctactgtggactggtgaccggcaacacttcgcagcaacagactgacagaaatgccttctactgcctggagtactttccttcgcagatgctgcggactggcaacaactttgaaattacgtacagttttgagaaggtgcctttccactcgatgtacgcgcacagccagagcctggaccggctgatgaaccctctcatcgaccagtacctgtggggactgcaatcgaccaccaccggaaccaccctgaatgccgggactgccaccaccaactttaccaagctgcggcctaccaacttttccaactttaaaaagaactggctgcccgggccttcaatcaagcagcagggcttctcaaagactgccaatcaaaactacaagatccctgccaccgggtcagacagtctcatcaaatacgagacgcacagcactctggacggaagatggagtgccctgacccccggacctccaatggccacggctggacctgcggacagcaagttcagcaacagccagctcatctttgcggggcctaaacagaacggcaacacggccaccgtacccgggactctgatcttcacctctgaggaggagctggcagccaccaacgccaccgatacggacatgtggggcaacctacctggcggtgaccagagcaacagcaacctgccgaccgtggacagactgacagccttgggagccgtgcctggaatggtctggcaaaacagagacatttactaccagggtcccatttgggccaagattcctcataccgatggacactttcacccctcaccgctgattggtgggtttgggctgaaacacccgcctcctcaaatttttatcaagaacaccccggtacctgcgaatcctgcaacgaccttcagctctactccggtaaactccttcattactcagtacagcactggccaggtgtcggtgcagattgactgggagatccagaaggagcggtccaaacgctggaaccccgaggtccagtttacctccaactacggacagcaaaactctctgttgtgggctcccgatgcggctgggaaatacactgagcctagggctatcggtacccgctacctcacccaccacctgtaa

SEQ ID NO: 48 - DNA, 939 bp, Adeno-associated virus 4
atggagctggtcgggtggctggtggaccgcgggatcacgtcagaaaagcaatggatccaggaggaccaggcgtcctacatctccttcaacgccgcctccaactcgcggtcacaaatcaaggccgcgctggacaatgcctccaaaatcatgagcctgacaaagacggctccggactacctggtgggccagaacccgccggaggacatttccagcaaccgcatctaccgaatcctcgagatgaacgggtacgatccgcagtacgcggcctccgtcttcctgggctgggcgcaaaagaagttcgggaagaggaacaccatctggctctttgggccggccacgacgggtaaaaccaacatcgcggaagccatcgcccacgccgtgcccttctacggctgcgtgaactggaccaatgagaactttccgttcaacgattgcgtcgacaagatggtgatctggtgggaggagggcaagatgacggccaaggtcgtagagagcgccaaggccatcctgggcggaagcaaggtgcgcgtggaccaaaagtgcaagtcatcggcccagatcgacccaactcccgtgatcgtcacctccaacaccaacatgtgcgcggtcatcgacggaaactcgaccaccttcgagcaccaacaaccactccaggaccggatgttcaagttcgagctcaccaagcgcctggagcacgactttggcaaggtcaccaagcaggaagtcaaagactttttccggtgggcgtcagatcacgtgaccgaggtgactcacgagttttacgtcagaaagggtggagctagaaagaggcccgcccccaatgacgcagatataagtgagcccaagcgggcctgtccgtcagttgcgcagccatcgacgtcagacgcggaagctccggtggactacgcggacagattggctagaggacaacctctctga

SEQ ID NO: 49 - DNA, 1197 bp, Adeno-associated virus 4
atggagctggtcgggtggctggtggaccgcgggatcacgtcagaaaagcaatggatccaggaggaccaggcgtcctacatctccttcaacgccgcctccaactcgcggtcacaaatcaaggccgcgctggacaatgcctccaaaatcatgagcctgacaaagacggctccggactacctggtgggccagaacccgccggaggacatttccagcaaccgcatctaccgaatcctcgagatgaacgggtacgatccgcagtacgcggcctccgtcttcctgggctgggcgcaaaagaagttcgggaagaggaacaccatctggctctttgggccggccacgacgggtaaaaccaacatcgcggaagccatcgcccacgccgtgcccttctacggctgcgtgaactggaccaatgagaactttccgttcaacgattgcgtcgacaagatggtgatctggtgggaggagggcaagatgacggccaaggtcgtagagagcgccaaggccatcctgggcggaagcaaggtgcgcgtggaccaaaagtgcaagtcatcggcccagatcgacccaactcccgtgatcgtcacctccaacaccaacatgtgcgcggtcatcgacggaaactcgaccaccttcgagcaccaacaaccactccaggaccggatgttcaagttcgagctcaccaagcgcctggagcacgactttggcaaggtcaccaagcaggaagtcaaagactttttccggtgggcgtcagatcacgtgaccgaggtgactcacgagttttacgtcagaaagggtggagctagaaagaggcccgcccccaatgacgcagatataagtgagcccaagcgggcctgtccgtcagttgcgcagccatcgacgtcagacgcggaagctccggtggactacgcggacaggtaccaaaacaaatgttctcgtcacgtgggtatgaatctgatgctttttccctgccggcaatgcgagagaatgaatcagaatgtggacatttgcttcacgcacggggtcatggactgtgccgagtgcttccccgtgtcagaatctcaacccgtgtctgtcgtcagaaagcggacgtatcagaaactgtgtccgattcatcacatcatggggagggcgcccgaggtggcctgctcggcctgcgaactggccaatgtggacttggatgactgtgacatggaacaa

SEQ ID NO: 50 - DNA, 245 bp, Adeno-associated virus 4
ctccatcatctaggtttgcccactgacgtcaatgtgacgtcctagggttagggaggtccctgtattagcagtcacgtgagtgtcgtatttcgcggagcgtagcggagcgcataccaagctgccacgtcacagccacgtggtccgtttgcgacagtttgcgacaccatgtggtcaggagggtatataaccgcgagtgagccagcgaggagctccattttgcccgcgaattttgaacgagcagcagc

SEQ ID NO: 51 - protein, 313 aa, Adeno-associated virus 4
  MOD_RES (313)..(313): Xaa= any amino acid
MELVGWLVDRGITSEKQWIQEDQASYISFNAASNSRSQIKAALDNASKIMSLTKTAPDYLVGQNPPEDISSNRIYRILEMNGYDPQYAASVFLGWAQKKFGKRNTIWLFGPATTGKTNIAEAIAHAVPFYGCVNWTNENFPFNDCVDKMVIWWEEGKMTAKVVESAKAILGGSKVRVDQKCKSSAQIDPTPVIVTSNTNMCAVIDGNSTTFEHQQPLQDRMFKFELTKRLEHDFGKVTKQEVKDFFRWASDHVTEVTHEFYVRKGGARKRPAPNDADISEPKRACPSVAQPSTSDAEAPVDYADRLARGQPLX

SEQ ID NO: 52 - protein, 399 aa, Adeno-associated virus 4
MELVGWLVDRGITSEKQWIQEDQASYISFNAASNSRSQIKAALDNASKIMSLTKTAPDYLVGQNPPEDISSNRIYRILEMNGYDPQYAASVFLGWAQKKFGKRNTIWLFGPATTGKTNIAEAIAHAVPFYGCVNWTNENFPFNDCVDKMVIWWEEGKMTAKVVESAKAILGGSKVRVDQKCKSSAQIDPTPVIVTSNTNMCAVIDGNSTTFEHQQPLQDRMFKFELTKRLEHDFGKVTKQEVKDFFRWASDHVTEVTHEFYVRKGGARKRPAPNDADISEPKRACPSVAQPSTSDAEAPVDYADRYQNKCSRHVGMNLMLFPCRQCERMNQNVDICFTHGVMDCAECFPVSESQPVSVVRKRTYQKLCPIHHIMGRAPEVACSACELANVDLDDCDMEQ

SEQ ID NO: 53 - protein, 623 aa, Adeno-associated virus 4
MPGFYEIVLKVPSDLDEHLPGISDSFVSWVAEKEWELPPDSDMDLNLIEQAPLTVAEKLQREFLVEWRRVSKAPEALFFVQFEKGDSYFHLHILVETVGVKSMVVGRYVSQIKEKLVTRIYRGVEPQLPNWFAVTKTRNGAGGGNKVVDDCYIPNYLLPKTQPELQWAWTNMDQYISACLNLAERKRLVAQHLTHVSQTQEQNKENQNPNSDAPVIRSKTSARYMELVGWLVDRGITSEKQWIQEDQASYISFNAASNSRSQIKAALDNASKIMSLTKTAPDYLVGQNPPEDISSNRIYRILEMNGYDPQYAASVFLGWAQKKFGKRNTIWLFGPATTGKTNIAEAIAHAVPFYGCVNWTNENFPFNDCVDKMVIWWEEGKMTAKVVESAKAILGGSKVRVDQKCKSSAQIDPTPVIVTSNTNMCAVIDGNSTTFEHQQPLQDRMFKFELTKRLEHDFGKVTKQEVKDFFRWASDHVTEVTHEFYVRKGGARKRPAPNDADISEPKRACPSVAQPSTSDAEAPVDYADRYQNKCSRHVGMNLMLFPCRQCERMNQNVDICFTHGVMDCAECFPVSESQPVSVVRKRTYQKLCPIHHIMGRAPEVACSACELANVDLDDCDMEQ

SEQ ID NO: 54 - protein, 537 aa, Adeno-associated virus 4
  MOD_RES (537)..(537): Xaa = any amino acid
MPGFYEIVLKVPSDLDEHLPGISDSFVSWVAEKEWELPPDSDMDLNLIEQAPLTVAEKLQREFLVEWRRVSKAPEALFFVQFEKGDSYFHLHILVETVGVKSMVVGRYVSQIKEKLVTRIYRGVEPQLPNWFAVTKTRNGAGGGNKVVDDCYIPNYLLPKTQPELQWAWTNMDQYISACLNLAERKRLVAQHLTHVSQTQEQNKENQNPNSDAPVIRSKTSARYMELVGWLVDRGITSEKQWIQEDQASYISFNAASNSRSQIKAALDNASKIMSLTKTAPDYLVGQNPPEDISSNRIYRILEMNGYDPQYAASVFLGWAQKKFGKRNTIWLFGPATTGKTNIAEAIAHAVPFYGCVNWTNENFPFNDCVDKMVIWWEEGKMTAKVVESAKAILGGSKVRVDQKCKSSAQIDPTPVIVTSNTNMCAVIDGNSTTFEHQQPLQDRMFKFELTKRLEHDFGKVTKQEVKDFFRWASDHVTEVTHEFYVRKGGARKRPAPNDADISEPKRACPSVAQPSTSDAEAPVDYADRLARGQPLX

SEQ ID NO: 55 - protein, 623 aa, Adeno-associated virus 4; identical to SEQ ID NO: 53

SEQ ID NO: 56 - protein, 544 aa, Adeno-associated virus 4
MSDDSEMRAAAGGAAVEGGQGADGVGNASGDWHCDSTWSEGHVTTTSTRTWVLPTYNNHLYKRLGESLQSNTYNGFSTPWGYFDFNRFHCHFSPRDWQRLINNNWGMRPKAMRVKIFNIQVKEVTTSNGETTVANNLTSTVQIFADSSYELPYVMDAGQEGSLPPFPNDVFMVPQYGYCGLVTGNTSQQQTDRNAFYCLEYFPSQMLRTGNNFEITYSFEKVPFHSMYAHSQSLDRLMNPLIDQYLWGLQSTTTGTTLNAGTATTNFTKLRPTNFSNFKKNWLPGPSIKQQGFSKTANQNYKIPATGSDSLIKYETHSTLDGRWSALTPGPPMATAGPADSKFSNSQLIFAGPKQNGNTATVPGTLIFTSEEELAATNATDTDMWGNLPGGDQSNSNLPTVDRLTALGAVPGMVWQNRDIYYQGPIWAKIPHTDGHFHPSPLIGGFGLKHPPPQIFIKNTPVPANPATTFSSTPVNSFITQYSTGQVSVQIDWEIQKERSKRWNPEVQFTSNYGQQNSLLWAPDAAGKYTEPRAIGTRYLTHHL

SEQ ID NO: 57 - protein, 734 aa, Adeno-associated virus 4
MTDGYLPDWLEDNLSEGVREWWALQPGAPKPKANQQHQDNARGLVLPGYKYLGPGNGLDKGEPVNAADAAALEHDKAYDQQLKAGDNPYLKYNHADAEFQQRLQGDTSFGGNLGRAVFQAKKRVLEPLGLVEQAGETAPGKKRPLIESPQQPDSSTGIGKKGKQPAKKKLVFEDETGAGDGPPEGSTSGAMSDDSEMRAAAGGAAVEGGQGADGVGNASGDWHCDSTWSEGHVTTTSTRTWVLPTYNNHLYKRLGESLQSNTYNGFSTPWGYFDFNRFHCHFSPRDWQRLINNNWGMRPKAMRVKIFNIQVKEVTTSNGETTVANNLTSTVQIFADSSYELPYVMDAGQEGSLPPFPNDVFMVPQYGYCGLVTGNTSQQQTDRNAFYCLEYFPSQMLRTGNNFEITYSFEKVPFHSMYAHSQSLDRLMNPLIDQYLWGLQSTTTGTTLNAGTATTNFTKLRPTNFSNFKKNWLPGPSIKQQGFSKTANQNYKIPATGSDSLIKYETHSTLDGRWSALTPGPPMATAGPADSKFSNSQLIFAGPKQNGNTATVPGTLIFTSEEELAATNATDTDMWGNLPGGDQSNSNLPTVDRLTALGAVPGMVWQNRDIYYQGPIWAKIPHTDGHFHPSPLIGGFGLKHPPPQIFIKNTPVPANPATTFSSTPVNSFITQYSTGQVSVQIDWEIQKERSKRWNPEVQFTSNYGQQNSLLWAPDAAGKYTEPRAIGTRYLTHHL

SEQ ID NO: 58 - protein, 598 aa, Adeno-associated virus 4
TAPGKKRPLIESPQQPDSSTGIGKKGKQPAKKKLVFEDETGAGDGPPEGSTSGAMSDDSEMRAAAGGAAVEGGQGADGVGNASGDWHCDSTWSEGHVTTTSTRTWVLPTYNNHLYKRLGESLQSNTYNGFSTPWGYFDFNRFHCHFSPRDWQRLINNNWGMRPKAMRVKIFNIQVKEVTTSNGETTVANNLTSTVQIFADSSYELPYVMDAGQEGSLPPFPNDVFMVPQYGYCGLVTGNTSQQQTDRNAFYCLEYFPSQMLRTGNNFEITYSFEKVPFHSMYAHSQSLDRLMNPLIDQYLWGLQSTTTGTTLNAGTATTNFTKLRPTNFSNFKKNWLPGPSIKQQGFSKTANQNYKIPATGSDSLIKYETHSTLDGRWSALTPGPPMATAGPADSKFSNSQLIFAGPKQNGNTATVPGTLIFTSEEELAATNATDTDMWGNLPGGDQSNSNLPTVDRLTALGAVPGMVWQNRDIYYQGPIWAKIPHTDGHFHPSPLIGGFGLKHPPPQIFIKNTPVPANPATTFSSTPVNSFITQYSTGQVSVQIDWEIQKERSKRWNPEVQFTSNYGQQNSLLWAPDAAGKYTEPRAIGTRYLTHHL

SEQ ID NO: 59 - DNA, 129 bp, Adeno-associated virus 4
ttggccactccctctatgcgcgctcgctcactcactcggccctgcggccagaggccggcagtctggagacctttggtgtccagggcagggccgagtgagtgagcgagcgcgcatagagggagtggccaa

SEQ ID NO: 60 - DNA, 125 bp, Adeno-associated virus 4
ttggccactccctctatgcgcgctcgctcactcactcggccctggagaccaaaggtctccagactgccggcctctggccggcagggccgagtgagtgagcgagcgcgcatagagggagtggccaa

SEQ ID NO: 61 - DNA, 4768 bp, Adeno-associated virus 4
  modified_base (3009)..(3009): n = a, c, t, or g
  misc_feature (3009)..(3009): n is a, c, g, or t
ttggccactccctctatgcgcgctcgctcactcactcggccctggagaccaaaggtctccagactgccggcctctggccggcagggccgagtgagtgagcgagcgcgcatagagggagtggccaactccatcatctaggtttgcccactgacgtcaatgtgacgtcctagggttagggaggtccctgtattagcagtcacgtgagtgtcgtatttcgcggagcgtagcggagcgcataccaagctgccacgtcacagccacgtggtccgtttgcgacagtttgcgacaccatgtggtcaggagggtatataaccgcgagtgagccagcgaggagctccattttgcccgcgaattttgaacgagcagcagccatgccggggttctacgagatcgtgctgaaggtgcccagcgacctggacgagcacctgcccggcatttctgactcttttgtgagctgggtggccgagaaggaatgggagctgccgccggattctgacatggacttgaatctgattgagcaggcacccctgaccgtggccgaaaagctgcaacgcgagttcctggtcgagtggcgccgcgtgagtaaggccccggaggccctcttctttgtccagttcgagaagggggacagctacttccacctgcacatcctggtggagaccgtgggcgtcaaatccatggtggtgggccgctacgtgagccagattaaagagaagctggtgacccgcatctaccgcggggtcgagccgcagcttccgaactggttcgcggtgaccaagacgcgtaatggcgccggaggcgggaacaaggtggtggacgactgctacatccccaactacctgctccccaagacccagcccgagctccagtgggcgtggactaacatggaccagtatataagcgcctgtttgaatctcgcggagcgtaaacggctggtggcgcagcatctgacgcacgtgtcgcagacgcaggagcagaacaaggaaaaccagaaccccaattctgacgcgccggtcatcaggtcaaaaacctccgccaggtacatggagctggtcgggtggctggtggaccgcgggatcacgtcagaaaagcaatggatccaggaggaccaggcgtcctacatctccttcaacgccgcctccaactcgcggtcacaaatcaaggccgcgctggacaatgcctccaaaatcatgagcctgacaaagacggctccggactacctggtgggccagaacccgccggaggacatttccagcaaccgcatctaccgaatcctcgagatgaacgggtacgatccgcagtacgcggcctccgtcttcctgggctgggcgcaaaagaagttcgggaagaggaacaccatctggctctttgggccggccacgacgggtaaaaccaacatcgcggaagccatcgcccacgccgtgcccttctacggctgcgtgaactggaccaatgagaactttccgttcaacgattgcgtcgacaagatggtgatctggtgggaggagggcaagatgacggccaaggtcgtagagagcgccaaggccatcctgggcggaagcaaggtgcgcgtggaccaaaagtgcaagtcatcggcccagatcgacccaactcccgtgatcgtcacctccaacaccaacatgtgcgcggtcatcgacggaaactcgaccaccttcgagcaccaacaaccactccaggaccggatgttcaagttcgagctcaccaagcgcctggagcacgactttggcaaggtcaccaagcaggaagtcaaagactttttccggtgggcgtcagatcacgtgaccgaggtgactcacgagttttacgtcagaaagggtggagctagaaagaggcccgcccccaatgacgcagatataagtgagcccaagcgggcctgtccgtcagttgcgcagccatcgacgtcagacgcggaagctccggtggactacgcggacaggtaccaaaacaaatgttctcgtcacgtgggtatgaatctgatgctttttccctgccggcaatgcgagagaatgaatcagaatgtggacatttgcttcacgcacggggtcatggactgtgccgagtgcttccccgtgtcagaatctcaacccgtgtctgtcgtcagaaagcggacgtatcagaaactgtgtccgattcatcacatcatggggagggcgcccgaggtggcctgctcggcctgcgaactggccaatgtggacttggatgactgtgacatggaacaataaatgactcaaaccagatatgactgacggttaccttccagattggctagaggacaacctctctgaaggcgttcgagagtggtgggcgctgcaacctggagcccctaaacccaaggcaaatcaacaacatcaggacaacgctcggggtcttgtgcttccgggttacaaatacctcggacccggcaacggactcgacaagggggaacccgtcaacgcagcggacgcggcagccctcgagcacgacaaggcctacgaccagcagctcaaggccggtgacaacccctacctcaagtacaaccacgccgacgcggagttccagcagcggcttcagggcgacacaccgtttgggggcaacctcggcagagcagtcttccaggccaaaaagagggttcttgaacctcttggtctggttgagcaagcgggtgagacggctcctggaaagaagagaccgttgattgaatccccccagcagcccgactcctccacgggtatcggcaaaaaaggcaagcagccggctaaaaagaagctcgttttcgaagacgaaactggagcaggcgacggaccccctgagggatcaacttccggagccatgtctgatgacagtgagatgcgtgcagcagctggcggagctgcagtcgagggsggacaaggtgccgatggagtgggtaatgcctcgggtgattggcattgcgattccacctggtctgagggccacgtcacgaccaccagcaccagaacctgggtcttgcccacctacaacaaccacctntacaagcgactcggagagagcctgcagtccaacacctacaacggattctccaccccctggggatactttgacttcaaccgcttccactgccacttctcaccacgtgactggcagcgactcatcaacaacaactggggcatgcgacccaaagccatgcgggtcaaaatcttcaacatccaggtcaaggaggtcacgacgtcgaacggcgagacaacggtggctaataaccttaccagcacggttcagatctttgcggactcgtcgtacgaactgccgtacgtgatggatgcgggtcaagagggcagcctgcctccttttcccaacgacgtctttatggtgccccagtacggctactgtggactggtgaccggcaacacttcgcagcaacagactgacagaaatgccttctactgcctggagtactttccttcgcagatgctgcggactggcaacaactttgaaattacgtacagttttgagaaggtgcctttccactcgatgtacgcgcacagccagagcctggaccggctgatgaaccctctcatcgaccagtacctgtggggactgcaatcgaccaccaccggaaccaccctgaatgccgggactgccaccaccaactttaccaagctgcggcctaccaacttttccaactttaaaaagaactggctgcccgggccttcaatcaagcagcagggcttctcaaagactgccaatcaaaactacaagatccctgccaccgggtcagacagtctcatcaaatacgagacgcacagcactctggacggaagatggagtgccctgacccccggacctccaatggccacggctggacctgcggacagcaagttcagcaacagccagctcatctttgcggggcctaaacagaacggcaacacggccaccgtacccgggactctgatcttcacctctgaggaggagctggcagccaccaacgccaccgatacggacatgtggggcaacctacctggcggtgaccagagcaacagcaacctgccgaccgtggacagactgacagccttgggagccgtgcctggaatggtctggcaaaacagagacatttactaccagggtcccatttgggccaagattcctcataccgatggacactttcacccctcaccgctgattggtgggtttgggctgaaacacccgcctcctcaaatttttatcaagaacaccccggtacctgcgaatcctgcaacgaccttcagctctactccggtaaactccttcattactcagtacagcactggccaggtgtcggtgcagattgactgggagatccagaaggagcggtccaaacgctggaaccccgaggtccagtttacctccaactacggacagcaaaactctctgttgtgggctcccgatgcggctgggaaatacactgagcctagggctatcggtacccgctacctcacccaccacctgtaataacctgttaatcaataaaccggtttattcgtttcagttgaactttggtctccgtgtccttcttatcttatctcgtttccatggctactgcgtacataagcagcggcctgcggcgcttgcgcttcgcggtttacaactgccggttaatcagtaacttctggcaaaccatgatgatggagttggccactccctctatgcgcgctcgctcactcactcggccctggagaccaaaggtctccagactgccggcctctggccggcagggccgagtgagtgagcgagcgcgcatagagggagtggccaa

SEQ ID NO: 62 - protein, 3098 aa, Adeno-associated virus
GAATTCGCCCTTTCTACGGCTGCGTCAACTGGACCAATGAGAACTTTCCCTTCAACGATTGCGTCGACAAGATGGTGATCTGGTGGGAGGAGGGCAAGATGACGGCCAAGGTCGTGGAGTCCGCCAAGGCCATTCTCGGCGGCAGCAAGGTGCGCGTGGACCAAAAGTGCAAGTCTTCCGCCCAGATCGATCCCACCCCCGTGATCGTCACTTCCAACACCAACATGTGCGCTGTGATTGACGGGAACAGCACCACCTTCGAGCACCAGCAGCCGTTACAAGACCGGATGTTCAAATTTGAACTCACCCGCCGTCTGGAGCACGACTTTGGCAAGGTGACAAAGCAGGAAGTCAAAGAGTTCTTCCGCTGGGCGCAGGATCACGTGACCGAGGTGGCGCATGAGTTCTACGTCAGAAAGGGTGGAGCCAACAAGAGACCCGCCCCCGATGACGCGGATAAAAGCGAGCCCAAGCGGGCCTGCCCCTCAGTCGCGGATCCATCGACGTCAGACGCGGAAGGAGCTCCGGTGGACTTTGCCGACAGGTACCAAAACAAATGTTCTCGTCACGCGGGCATGCTTCAGATGCTGTTTCCCTGCAAGACATGCGAGAGAATGAATCAGAATTTCAACATTTGCTTCACGCACGGGACCAGAGACTGTTCAGAATGTTTCCCCGGCGTGTCAGAATCTCAACCGGTCGTCAGAAAGAGGACGTATCGGAAACTCTGTGCCATTCATCATCTGCTGGGGCGGGCTCCCGAGATTGCTTGCTCGGCCTGCGATCTGGTCAACGTGGACCTGGATGACCGTGTTTCTGAGCAATAAATGACTTAAACCAGGTATGGCTGCCGATGGTTATCTTCCAGATTGGCTCGAGGACAACCTCTCTGAGGGCATTCGCGAGTGGTGGGACTTGAAACCTGGAGCCCCGAAACCCAAAGCCAACCAGCAAAAGCAGGACGACGGCCGGGGTCTGGTGCTTCCTGGCTACAAGTACCTCGGACCCTTCAACGGACTCGACAAGGGAGAGCCGGTCAACGAGGCAGACGCCGCGGCCCTCGAGCACGACAAGGCCTACGACAAGCAGCTCGAGCAGGGGGACAACCCGTACCTCAAGTACAACCACGCCGACGCCGAGTTTCAGGAGCGTCTTCAAGAAGATACGTCTTTTGGGGGCAACCTCGGGCGAGCAGTCTTCCAGGCCAAGAAGCGGGTTCTCGAACCTCTCGGTCTGGTTGAGGAAGGCGCTAAGACGGCTCCTGGAAAGAAGAGACCCATAGAATCCCCCGACTCCTCCACGGGCATCGGCAAGAAAGGCCAGCAGCCCGCTAAAAAGAAGCTCAACTTTGGGCAGACTGGCGACTCAGAGTCAGTGCCCGACCCCCAACCTCTCGGAGAACCTCCCGCCGCGCCCTCAGGTCTGGGATCTGGTACAATGGCTGCAGGCGGTGGCGCACCAATGGCAGACAATAACGAAGGCGCCGACGGAGTGGGTAATGCCTCCGGAAATTGGCATTGCGATTCCACATGGCTGGGCGACAGAGTCATCACCACCAGCACCCGCACCTGGGCCCTGCCCACCTACAACAACCACCTCTACAAGCAGATATCAAGTCAGAGCGGGGCTACCAACGACAACCACTTCTTCGGCTACAGCACCCCCTGGGGCTATTTTGACTTCAACAGATTCCACTGCCACTTCTCACCACGTGACTGGCAGCGACTCATCAACAACAACTGGGGATTCCGGCCCAGAAAGCTGCGGTTCAAGTTGTTCAACATCCAGGTCAAGGAGGTCACGACGAACGACGGCGTTACGACCATCGCTAATAACCTTACCAGCACGATTCAGGTCTTCTCGGACTCGGAGTACCAACTGCCGTACGTCCTCGGCTCTGCGCACCAGGGCTGCCTCCCTCCGTTCCCTGCGGACGTGTTCATGATTCCTCAGTACGGATATCTGACTCTAAACAACGGCAGTCAGTCTGTGGGACGTTCCTCCTTCTACTGCCTGGAGTACTTTCCTTCTCAGATGCTGAGAACGGGCAATAACTTTGAATTCAGCTACACCTTTGAGGAAGTGCCTTTCCACAGCAGCTATGCGCACAGCCAGAGCCTGGACCGGCTGATGAATCCCCTCATCGACCAGTACCTGTACTACCTGGCCCGGACCCAGAGCACTACGGGGTCCACAAGGGAGCTGCAGTTCCATCAGGCTGGGCCCAACACCATGGCCGAGCAATCAAAGAACTGGCTGCCCGGACCCTGTTATCGGCAGCAGAGACTGTCAAAAAACATAGACAGCAACAACAACAGTAACTTTGCCTGGACCGGGGCCACTAAATACCATCTGAATGGTAGAAATTCATTAACCAACCCGGGCGTAGCCATGGCCACCAACAAGGACGACGAGGACCAGTTCTTTCCCATCAACGGAGTGCTGGTTTTTGGCGAAACGGGGGCTGCCAACAAGACAACGCTGGAAAACGTGCTAATGACCAGCGAGGAGGAGATCAAAACCACCAATCCCGTGGCTACAGAAGAATACGGTGTGGTCTCCAGCAACCTGCAATCGTCTACGGCCGGACCCCAGACACAGACTGTCAACAGCCAGGGGGCTCTGCCCGGCATGGTCTGGCAGAACCGGGACGTGTACCTGCAGGGTCCCATCTGGGCCAAAATTCCTCACACGGACGGCAACTTTCACCCGTCTCCCCTGATGGGCGGATTTGGACTCAAACACCCGCCTCCTCAAATTCTCATCAAAAACACCCCGGTACCTGCTAATCCTCCAGAGGTGTTTACTCCTGCCAAGTTTGCCTCATTTATCACGCAGTACAGCACCGGCCAGGTCAGCGTGGAGATCGAGTGGGAACTGCAGAAAGAAAACAGCAAACGCTGGAATCCAGAGATTCAGTACACCTCAAATTATGCCAAGTCTAATAATGTGGAATTTGCTGTCAACAACGAAGGGGTTTATACTGAGCCTCGCCCCATTGGCACCCGTTACCTCACCCGTAACCTGTAATTGCCTGTTAATCAATAAACCGGTTAATTCGTTTCAGTTGAACTTTGGTCTCTGCGAAGGGCGAATTC

SEQ ID NO: 63 - protein, 728 aa, Adeno-associated virus
MAADGYLPDWLEDNLSEGIREWWDLKPGAPKPKANQQKQDDGRGLVLPGYKYLGPFNGLDKGEPVNEADAAALEHDKAYDKQLEQGDNPYLKYNHADAEFQERLQEDTSFGGNLGRAVFQAKKRVLEPLGLVEEGAKTAPGKKRPIESPDSSTGIGKKGQQPAKKKLNFGQTGDSESVPDPQPLGEPPAAPSGLGSGTMAAGGGAPMADNNEGADGVGNASGNWHCDSTWLGDRVITTSTRTWALPTYNNHLYKQISSQSGATNDNHFFGYSTPWGYFDFNRFHCHFSPRDWQRLINNNWGFRPRKLRFKLFNIQVKEVTTNDGVTTIANNLTSTIQVFSDSEYQLPYVLGSAHQGCLPPFPADVFMIPQYGYLTLNNGSQSVGRSSFYCLEYFPSQMLRTGNNFEFSYTFEEVPFHSSYAHSQSLDRLMNPLIDQYLYYLARTQSTTGSTRELQFHQAGPNTMAEQSKNWLPGPCYRQQRLSKNIDSNNNSNFAWTGATKYHLNGRNSLTNPGVAMATNKDDEDQFFPINGVLVFGETGAANKTTLENVLMTSEEEIKTTNPVATEEYGVVSSNLQSSTAGPQTQTVNSQGALPGMVWQNRDVYLQGPIWAKIPHTDGNFHPSPLMGGFGLKHPPPQILIKNTPVPANPPEVFTPAKFASFITQYSTGQVSVEIEWELQKENSKRWNPEIQYTSNYAKSNNVEFAVNNEGVYTEPRPIGTRYLTRNL

SEQ ID NO: 64 - DNA, 2495 bp, Adeno-associated virus
gaattcgccctttctacggctgcgtcaactagaccaatgagaactttcccttcaacgattgcgtcgacaagatggtgatctggtgggaggagggcaagatgacggccaaggtcgtggagtccgccaaggccattcatcatctgctggggcgggctcccgagattgcttgctcggcctgcgatctggtcaacgtggacctggatgactgtgtttctgagcaataaatgacttaaaccaggtatggctgccgatggttatcttccagattggctcgaggacaacctctctgagggcattcgcgagtggtgggacttgaaacctggagccccgaaacccaaagccaaccagcaaaagcaggacgacggccggggtctggtgcttcctggctacaagtacctcggacccttcaacggactcgacaagggagagccggtcaacgaggcagacgccgcggccctcgagcacgacaaggcctacgacaagcagctcgagcagggggacaacccgtacctcaagtacaaccacgccgacgccgagtttcaggagcgtcttcaagaagatacgtcttttgggggcaacctcgggcgagcagtcttccaggccaagaagcgggttctcgaacctctcggtctggttgaggaaggcgctaagacggctcctggaaagaagagacccatagaatcccccgactcctccacgggcatcggcaagaaaggccagcagcccgctaaaaagaagctcaactttgggcagactggcgactcagagtcagtgcccgaccctcaaccaatcggagaaccccccgcaggcccctctggtctgggatctggtacaatggctgcaggcggtggcgctccaatggcagacaataacgaaggcgccgacggagtgggtaatgcctccggaaattggcattgcgattccacatggctgggcgacagagtcatcaccaccagcacccgcacctgggccctgcccacctacaacaaccacctctacaagcagatatcaagtcagagcggggctaccaacgacaaccacttcttcggctacagcaccccctggggctattttgacttcaacagattccactgccacttctcaccacgtgactggcagcgactcatcaacaacaactggggattccggcccagaaagctgcggttcaagttgttcaacatccaggtcaaggaggtcacgacgaacgacggcgttacgaccatcgctaataaccttaccagcacgattcaggtcttctcggactcggagtaccaactgccgtacgtcctcggctctgcgcaccagggctgcctccctccgttccctgcggacgtgttcatgattcctcagtacggatatctgactctaaacaacggcagtcagtctgtgggacgttcctccttctactgcctggagtactttccttctcagatgctgagaacgggcaataactttgaattcagctacacctttgaggaagtgcctttccacagcagctatgcgcacagccagagcctggaccggctgatgaatcccctcatcgaccagtacctgtactacctggcccggacccagagcactacggggtccacaagggagctgcagttccatcaggctgggcccaacaccatggccgagcaatcaaagaactggctgcccggaccctgttatcggcagcagagactgtcaaaaaacatagacagcaacaacaccagtaactttgcctggaccggggccactaaataccatctgaatggtagaaattcattaaccaacccgggcgtagccatggccaccaacaaggacgacgaggaccagttctttcccatcaacggagtgctggtttttggcaaaacgggggctgccaacaagacaacgctggaaaacgtgctaatgaccagcgaggaggagatcaaaaccaccaatcccgtggctacagaacagtacggtgtggtctccagcaacctgcaatcgtctacggccggaccccagacacagactgtcaacagccagggggctctgcccggcatggtctggcagaaccgggacgtgtacctgcagggtcccatctgggccaaaattcctcacacggacggcaactttcacccgtctcccctgatgggcggatttggactcaaacacccgcctcctcaaattctcatcaaaaacaccccggtacctgctaatcctccagaggtgtttactcctgccaagtttgcctcatttatcacgcagtacagcaccggccaggtcagcgtggagatcgagtgggaactgcagaaagaaaacagcaaacgctggaatccagagattcagtacacctcaaattatgccaagtctaataatgtggaatttgctgtcaacaacgaaggggtttatactgagcctcgccccattggcacccgttacctcacccgtaacctgtaattgcctgttaatcaataaaccggttaattcgtttcagttgaactttggtctctgcgaagggcgaattc

SEQ ID NO: 65 - protein, 728 aa, Adeno-associated virus
MAADGYLPDWLEDNLSEGIREWWDLKPGAPKPKANQQKQDDGRGLVLPGYKYLGPFNGLDKGEPVNEADAAALEHDKAYDKQLEQGDNPYLKYNHADAEFQERLQEDTSFGGNLGRAVFQAKKRVLEPLGLVEEGAKTAPGKKRPIESPDSSTGIGKKGQQPAKKKLNFGQTGDSESVPDPQPIGEPPAGPSGLGSGTMAAGGGAPMADNNEGADGVGNASGNWHCDSTWLGDRVITTSTRTWALPTYNNHLYKQISSQSGATNDNHFFGYSTPWGYFDFNRFHCHFSPRDWQRLINNNWGFRPRKLRFKLFNIQVKEVTTNDGVTTIANNLTSTIQVFSDSEYQLPYVLGSAHQGCLPPFPADVFMIPQYGYLTLNNGSQSVGRSSFYCLEYFPSQMLRTGNNFEFSYTFEEVPFHSSYAHSQSLDRLMNPLIDQYLYYLARTQSTTGSTRELQFHQAGPNTMAEQSKNWLPGPCYRQQRLSKNIDSNNTSNFAWTGATKYHLNGRNSLTNPGVAMATNKDDEDQFFPINGVLVFGKTGAANKTTLENVLMTSEEEIKTTNPVATEQYGVVSSNLQSSTAGPQTQTVNSQGALPGMVWQNRDVYLQGPIWAKIPHTDGNFHPSPLMGGFGLKHPPPQILIKNTPVPANPPEVFTPAKFASFITQYSTGQVSVEIEWELQKENSKRWNPEIQYTSNYAKSNNVEFAVNNEGVYTEPRPIGTRYLTRNL

SEQ ID NO: 66 - DNA, 2504 bp, Adeno-associated virus
gaattcgccctttctacggctgcgtcaactggaccaatgagaactttcccttcaacgattgcgtcgacaagatggtgatctggtgggaggagggcaagatgacggccaaggtcgtggagtccgccaaggccattcatcatctgctggggcgggctcccgagattgcttgctcggcctgcgatctggtcaacgtggacctggatgactgtgtttctgagcaataaatgacttaaaccaggtatggctgccgatggttatcttccagattggctcgaggacaacctctctgagggcattcgcgagtggtgggacttgaaacctggagccccgaaacccaaagccaaccagcaaaagcaggacgacggccggggtctggtgcttcctggctacaagtacctcggacccttcaacggactcgacaagggagagccggtcaacgaggcagacgccgcggccctcgagcacgacaaggcctacgacaagcagctcgagcagggggacaacccgtacctcaagtacaaccacgccgacgccgagtttcaggagcgtcttcaagaagatacgtcttttgggggcaacctcgggcgagcagtcttccaggccaagaagcgggttctcgaacctctcggtctggttgaggaaggcgctaagacggctcctggaaagaagagacccatagaatcccccgactcctccacgggcatcggcaagaaaggccagcagcccgctaaaaagaagctcaactttgggcagactggcgactcagagtcagtgcccgaccctcaaccaatcggagaaccccccgcaggcccctctggtctgggatctggtacaatggctgcaggcggtggcgctccaatggcagacaataacgaaggcgccgacggagtgggtaatgcctccggaaattggcattgcgattccacatggctgggcgacagagtcatcaccaccagcacccgcacctgggccctgcccacctacaacaaccacctctacaagcagatatcaagtcagagcggggctaccaacgacaaccacttcttcggctacagcaccccctggggctattttgacttcaacagattccactgccacttctcatcacgtgactggcagcgactcatcaacaacaactggggattccggcccaagagactcaacttcaagctcttcaacatccaggtcaaggaggtcacgcagaatgaaggcaccaagaccatcgccaataaccttaccagcacgattcaggtctttacggactcggaataccggctcccgtacgtcctcggctctgcgcaccagggctgcctgcctccgttcccggcggacgtcttcatgattcctcagtacgggtacctgactctgaacaacggcagtcaggccgtgggccgttcctccttctactgcctggagtactttccttctcaaatgctgagaacgggcaacaactttgagttcagctaccagtttgaggacgtgccttttcacagcagctacgcgcacagccaaagcctggaccggctgatgaaccccctcatcgaccagtacctgtactacctgtctcggactcagtccacgggaggtaccgcaggaactcagcagttgctattttctcaggccgggcctaataacatgtcggctcaggccaaaaactggctacccgggccctgctaccggcagcaacgcgtctccacgacactgtcgcaaaataacaacagcaactttgcttggaccggtgccaccaagtatcatctgaatggcagagactctctggtaaatcccggtgtcgctatggcaacgcacaaggacgacgaagagcgattttttccatccagcggagtcttgatgtttgggaaacagggagctggaaaagacaacgtggactatagcagcgttatgctaaccagtgaggaagaaatcaaaaccaccaacccagtggccacagaacagtacggcgtggtggccgataacctgcaacagcaaaacgccgctcctattgtaggggccgtcaacagtcaaggagccttacctggcatggtctggcagaaccgggacgtgtacctgcagggtcctatctgggccaagattcctcacacggacggcaactttcatccttcgccgctgatgggaggctttggactgaaacacccgcctcctcagatcctgattaagaatacacctgttcccgcggatcctccaactaccttcagtcaagccaagccggcgtcgttcatcacgcagtacagcaccggacaggtcagcgtggaaattgaatgggagctgcagaaagagaacagcaagcgctggaacccagagattcagtatacttccaactactacaaatctacaaatgtggactttgctgtcaatactgagggtacttattcagagcctcgccccattggcacccgttacctcacccgtaacctgtaattgcctgttaatcaataaaccggttaattcgtttcagttgaactttggtctctgcgaagggcgaattc

SEQ ID NO: 67 - protein, 731 aa, Adeno-associated virus
MAADGYLPDWLEDNLSEGIREWWDLKPGAPKPKANQQKQDDGRGLVLPGYKYLGPFNGLDKGEPVNEADAAALEHDKAYDKQLEQGDNPYLKYNHADAEFQERLQEDTSFGGNLGRAVFQAKKRVLEPLGLVEEGAKTAPGKKRPIESPDSSTGIGKKGQQPAKKKLNFGQTGDSESVPDPQPIGEPPAGPSGLGSGTMAAGGGAPMADNNEGADGVGNASGNWHCDSTWLGDRVITTSTRTWALPTYNNHLYKQISSQSGATNDNHFFGYSTPWGYFDFNRFHCHFSSRDWQRLINNNWGFRPKRLNFKLFNIQVKEVTQNEGTKTIANNLTSTIQVFTDSEYRLPYVLGSAHQGCLPPFPADVFMIPQYGYLTLNNGSQAVGRSSFYCLEYFPSQMLRTGNNFEFSYQFEDVPFHSSYAHSQSLDRLMNPLIDQYLYYLSRTQSTGGTAGTQQLLFSQAGPNNMSAQAKNWLPGPCYRQQRVSTTLSQNNNSNFAWTGATKYHLNGRDSLVNPGVAMATHKDDEERFFPSSGVLMFGKQGAGKDNVDYSSVMLTSEEEIKTTNPVATEQYGVVADNLQQQNAAPIVGAVNSQGALPGMVWQNRDVYLQGPIWAKIPHTDGNFHPSPLMGGFGLKHPPPQILIKNTPVPADPPTTFSQAKPASFITQYSTGQVSVEIEWELQKENSKRWNPEIQYTSNYYKSTNVDFAVNTEGTYSEPRPIGTRYLTRNL

SEQ ID NO: 68 - DNA, 3128 bp, Adeno-associated virus
gaattcgccctttctacggctgcgtcaactggaccaatgagaactttcccttcaacgattgcgtcgacaagatggtgatctggtgggaggagggcaagatgacggccaaggtcgtggagtccgccaaggccattctcggcggcagcaaggtgcgcgtggaccaaaagtgcaagtcttccgcccagatcgatcccacccccgtgatcgtcacttccaacaccaacatgtgcgccgtgattgacgggaacagcaccaccttcgagcaccagcagccgttacaagaccggatgttcaaatttgaactcacccgccgtctggagcacgactttggcaaggtgacaaagcaggaagtcaaagagttcttccgctgggcgcaggatcacgtgaccgaggtggcgcatgagttctacgtcagaaagggtggagccaacaagagacccgcccccgatgacgcggataaaagcgagcccaagcgggcctgcccctcagtcgcggatccatcgacgtcagacgcggaaggagctccggtggactttgccgacaggtaccaaaacaaatgttctcgtcacgcgggcatgcttcagatgctgtttccctgcaagacatgcgagagaatgaatcagaatttcaacatttgcttcacgcacgggaccagagactgttcagaatgtttccccggcgtgtcagaatctcaaccggtcgtcagaaagaggacgtatcggaaactctgtgccattcatcatctgctagggcgggctcccgagattgcttgctcggcctgcgatctggtcaacgtggacctggatgactgtgtttctgagcaataaatgacttaaaccaggtatggctgccgatggttatcttccagattggctcgaggacaacctctctgagggcattcgcgagtggtgggacttgaaacctggagccccgaaacccaaagccaaccagcaaaagcaggacgacggccggggtctggtgcttcctggctacaagtacctcggacccttcaacggactcgacaagggggagcccgtcaacgcggcggacgcagcggccctcgagcacgacaaggcctacgaccagcagctcaaagcgggtgacaatccgtacctgcggtataaccacgccgacgccgagtttcaggagcgtctgcaagaagatacgtcttttgggggcaacctcgggcgagcagtcttccaggccaagaagcgggttctcgaacctctcggtctggttgaggaaggcgctaagacggctcctggaaagaagagaccggtagagccatcaccccagcgttctccagactcctctacgggcatcggcaagacaggccagcagcccgcgaaaaagagactcaactttgggcagactggcgactcagagtcagtgcccgaccctcaaccaatcggagaaccccccgcaggcccctctggtctgggatctggtacaatggctgcaggcggtggcgctccaatggcagacaataacgaaggcgccgacggagtgggtagttcctcaggaaattggcattgcgattccacatggctgggcgacagagtcatcaccaccagcacccgaacctgggccctccccacctacaacaaccacctctacaagcaaatctccaacgggacatcgggaggaagcaccaacgacaacacctacttcggctacagcaccccctgggggtattttgactttaacagattccactgccacttctcaccacgtgactggcagcgactcatcaacaacaactggggattccggcccaagagactcaacttcaagctcttcaacatccaggtcaaggaggtcacgcagaatgaaggcaccaagaccatcgccaataaccttaccagcacgattcaggtctttacggactcggaataccagctcccgtacgtcctcggctctgcgcaccagggctgcctgcctccgttcccggcggacgtcttcatgattcctcagtacgggtacctgactctgaacaacggcagtcaggccgtgggccgttcctccttctactgcctggagtactttccttctcaaatgctgagaacgggcaacaactttgagttcagctaccagtttgaggacgtgccttttcacagcagctacgcgcacagccaaagcctggaccggctgatgaaccccctcatcgaccagtacctgtactacctgtctcggactcagtccacgggaggtaccgcaggaactcagcagttgctattttctcaggccgggcctaataacatgtcggctcaggccaaaaactggctacccgggccctgctaccggcagcaacgcgtctccacgacactgtcgcaaaataacaacagcaactttgcttggaccggtgccaccaagtatcatctgaatggcagagactctctggtaaatcccggtgtcgctatggcaacgcacaaggacgacgaagagcgattttttccatccagcggagtcttgatgtttgggaaacagggagctggaaaagacaacgtggactatagcagcgttatgctaaccagtgaggaagaaatcaaaaccaccaacccagtggccacagaacagtacggcgtggtggccgataacctgcaacagcaaaacgccgctcctattgtaggggccgtcaacagtcaaggagccttacctggcatggtctggcagaaccgggacgtgtacctgcagggtcctatctgggccaagattcctcacacggacggcaactttcatccttcgccgctgatgggaggctttggactgaaacacccgcctcctcagatcctgattaagaatacacctgttcccgcggatcctccaactaccttcagtcaagccaagctggcgtcgttcatcacgcagtacagcaccggacaggtcagcgtggaaattgaatgggagctgcagaaagagaacagcaagcgctggaacccagagattcagtatacttccaactactacaaatctacaaatgtggactttgctgtcaatactgagggtacttattcagagcctcgccccattggcacccgttacctcacccgtaacctgtaattgcctgttaatcaataaaccggctaattcgtttcagttgaactttggtctctgcgaagggcgaattc

SEQ ID NO: 69 - protein, 738 aa, Adeno-associated virus
MAADGYLPDWLEDNLSEGIREWWDLKPGAPKPKANQQKQDDGRGLVLPGYKYLGPFNGLDKGEPVNAADAAALEHDKAYDQQLKAGDNPYLRYNHADAEFQERLQEDTSFGGNLGRAVFQAKKRVLEPLGLVEEGAKTAPGKKRPVEPSPQRSPDSSTGIGKTGQQPAKKRLNFGQTGDSESVPDPQPIGEPPAGPSGLGSGTMAAGGGAPMADNNEGADGVGSSSGNWHCDSTWLGDRVITTSTRTWALPTYNNHLYKQISNGTSGGSTNDNTYFGYSTPWGYFDFNRFHCHFSPRDWQRLINNNWGFRPKRLNFKLFNIQVKEVTQNEGTKTIANNLTSTIQVFTDSEYQLPYVLGSAHQGCLPPFPADVFMIPQYGYLTLNNGSQAVGRSSFYCLEYFPSQMLRTGNNFEFSYQFEDVPFHSSYAHSQSLDRLMNPLIDQYLYYLSRTQSTGGTAGTQQLLFSQAGPNNMSAQAKNWLPGPCYRQQRVSTTLSQNNNSNFAWTGATKYHLNGRDSLVNPGVAMATHKDDEERFFPSSGVLMFGKQGAGKDNVDYSSVMLTSEEEIKTTNPVATEQYGVVADNLQQQNAAPIVGAVNSQGALPGMVWQNRDVYLQGPIWAKIPHTDGNFHPSPLMGGFGLKHPPPQILIKNTPVPADPPTTFSQAKLASFITQYSTGQVSVEIEWELQKENSKRWNPEIQYTSNYYKSTNVDFAVNTEGTYSEPRPIGTRYLTRNL

SEQ ID NO: 70 - DNA, 3084 bp, Adeno-associated virus
gaattcgccctttctacggctgcatcaactggaccaatgagaactttcccttcaacgattgcgtcgacaagatggtgatctggtgggaggagggcaagatgacggccaaggtcgtggagtccgccaaggccattctcggcggcagcaaggtgcgcgtggaccaaaagtgcaagtcgtccgcccagatcgaccccacccccgtgatcgtcacctccaacaccaacatgtgcgccgtgattgacgggaacagcaccaccttcgagcaccagcagccgttgcaggaccggatgttcaagttcgaactcacccgccgtctggagcacgactttggcaaggtgaccaagcaggaagtcaaagagttcttccgctgggcgcaggatcacgtgaccgaggtggcgcatgagttctacgtcagaaagggcggagccagcaaaagacccgcccccgatgacgcggatataagcgagcccaagcgggcctgcccctcagtcgcggatccatcgacgtcagacgcggaaggagctccggtggactttgccgacaggtaccaaaacaaatgttctcgtcacgcgggcatgcttcagatgctgtttccctgcaaaacgtgcgagaaaatgaatcagaatttcaacatttgcttcacgcacggggtcagagactgctcagaatgtttccccggtgcatcagaatctcaaccggtcgtcagaaaaaaaacgtatcagaaactgtgtgccattcatcatctgctggggcgggcacccgagattgcttgctcggcctgcgatctggtcaacgtggacctggacgactgtgtttctgagcaataaatgacttaaaccaggtatggctgccgatggttatcttccagattggcttgaggacaacctctctgagggcattcgcgagtggtgggacctgaaacctggagccccgaaacccaaagccaaccagcaaaagcaggacgacggccggggtctggtgcttcctggctacaagtacctcggacccttcaacggactcgacaagggggagcccgtcaacgcggcggacgcagcggccctcgagcacgacaaggcctacgaccagcagctcaaagcgggtgacaatccgtacctgcggtataaccacgccgacgccgagtttcaggagcgtctgcaagaagatacgtcttttgggggcaacctcgggcgagcagtcttccaggccaagaagcgggttctcgaacctctcggtctggttgaggaaggcgctaagacggctcctggaaagaagagaccggtagagccatcacctcagcgttcccccgactcctccacgggcatcggcaagaaaggccaccagcccgcgagaaagagactgaactttgggcagactggcgactcggagtcagtccccgaccctcaaccaatcggagaaccaccagcaggcccctctggtctgggatctggtacaatggctgcaggcggtggcgctccaatggcagacaataacgaaggcgccgacggagtgggtagttcctcaggaaattggcattgcgattccacatggctgggcgacagagtcatcaccaccagcacccgaacctgggccctgcccacctacaacaaccatctctacaagcaaatctccaacgggacatcgggaggaagcactaacgacaacacctactttggctacagcaccccctgggggtattttgacttcaacagattccactgccacttctcaccacgtgactggcagcgactcatcaacaataactggggattccggcccaagagactcaacttcaagctcttcaacatccaggtcaaggaggtcacgcagaatgaaggcaccaagaccatcgccaataaccttaccagcacgattcaggtgtttacggactcggaataccagctcccgtacgtccccggctctgcgcaccagggctgcctccctccgttcccggcggacgtcttcatgattcctcagtacgggtatctgaccctaaacaatggcagtcaggctgtgggccgttcctccttctactgcctggaatacttcccttctcaaatgctgaggacgggcaacaactttgaattcagctacaccttcgaggacgtgcctttccacagcagctacgcgcacagccagagcctggaccggctgatgaaccctctcatcgaccagtacctgtattacttatccagaactcagtccacaggaggaactcaaggtactcagcaattgttattttctcaagccgggcccgcaaacatgtcggctcaggccaagaactggctacctggaccgtgttaccgtcagcaacgagtttccacgacactgtcgcaaaacaacaacagcaattttgcttggaccggtgccaccaagtatcacctgaatggcagagactccctggttaatcccggcgttgccatggctacccacaaggacgacgaggagcgcttcttcccgtcaagcggagttctaatgtttggcaagcagggggctggaaaagacaatgtggactacagcagcgtgatgctcaccagcgaagaagaaattaaaactactaacccagtggctacagagcagtatggtgtggtggcagacaacctgcagcagaccaacggagctcccattgtgggaactgtcaacagccagggggccttacctggtatggtctggcaaaaccgggacgtgtacctgcagggccccatctgggccaaaattcctcacacggacggcaactttcatccttcgccgctgatgggaggctttggactgaaacacccgcctcctcagatcctggtgaaaaacactcctgttcctgcggatcctccgaccaccttcagccaggccaagctggcttcttttatcacgcagtacagcaccggacaggtcagcgtggaaatcgaatgggagctgcagaaagaaaacagcaagcgctggaacccagagattcagtatacttccaactactacaaatctacaaatgtggactttgctgtcaatactgagggtacttattcagagcctcgccccattggcactcgttatctcacccgtaatctgtaattgcttgttaatcaataaaccggt

SEQ ID NO: 71 - protein, 738 aa, Adeno-associated virus
MAADGYLPDWLEDNLSEGIREWWDLKPGAPKPKANQQKQDDGRGLVLPGYKYLGPFNGLDKGEPVNAADAAALEHDKAYDQQLKAGDNPYLRYNHADAEFQERLQEDTSFGGNLGRAVFQAKKRVLEPLGLVEEGAKTAPGKKRPVEPSPQRSPDSSTGIGKKGHQPARKRLNFGQTGDSESVPDPQPIGEPPAGPSGLGSGTMAAGGGAPMADNNEGADGVGSSSGNWHCDSTWLGDRVITTSTRTWALPTYNNHLYKQISNGTSGGSTNDNTYFGYSTPWGYFDFNRFHCHFSPRDWQRLINNNWGFRPKRLNFKLFNIQVKEVTQNEGTKTIANNLTSTIQVFTDSEYQLPYVPGSAHQGCLPPFPADVFMIPQYGYLTLNNGSQAVGRSSFYCLEYFPSQMLRTGNNFEFSYTFEDVPFHSSYAHSQSLDRLMNPLIDQYLYYLSRTQSTGGTQGTQQLLFSQAGPANMSAQAKNWLPGPCYRQQRVSTTLSQNNNSNFAWTGATKYHLNGRDSLVNPGVAMATHKDDEERFFPSSGVLMFGKQGAGKDNVDYSSVMLTSEEEIKTTNPVATEQYGVVADNLQQTNGAPIVGTVNSQGALPGMVWQNRDVYLQGPIWAKIPHTDGNFHPSPLMGGFGLKHPPPQILVKNTPVPADPPTTFSQAKLASFITQYSTGQVSVEIEWELQKENSKRWNPEIQYTSNYYKSTNVDFAVNTEGTYSEPRPIGTRYLTRNL

SEQ ID NO: 72 - DNA, 3123 bp, Adeno-associated virus
gaattcgcccttggctgcgtcaactggaccaatgagaactttcccttcaacgattgcgtcgacaagatggtgatctggtgggaggagggcaagatgacggccaaggtcgtggagtccgccaaggccattctcggcggcagcaaggtgcgcgtggaccaaaagtgcaagtcgtccgcccagatcgaccccacccccgtgatcgtcacctccaacaccaacatgtgcgccgtgattgacgggaacagcaccaccttcgagcaccagcagccgttgcaggaccggatgttcaagttcgaactcacccgccgtctggagcacgactttggcaaggtgaccaagcaggaagtcaaagagttcttccgctgggcgcaggatcacgtgaccgaggtggcgcatgagttctacgtcagaaagggcggagccagcaaaagacccgcccccgatgacgcggatataagcgagcccaagcgggcctgcccctcagtcgcggatccatcgacgtcagacgcggaaggagctccggtggactttgccgacaggtaccaaaacaaatgttctcgtcacgcgggcatgctccagatgctgtttccctgcaaaacgtgcgagagaatgaatcagaatttcaacatttgcttcacgcacggggtcagagactgctcagaatgtttccccggtgcatcagaatctcaaccggtcgtcagaaaaaaaacgtatcagaaactgtgtgccattcatcatctgctggggcgggcacccgagattgcttgctcggcctgcgatctggtcaacgtggacctggacgactgtgtttctgagcaataaatgacttaaaccaggtatggctgccgatggttatcttccagattggcttgaggacaacctctctgagggcattcgcgagtggtgggacctgaaacctggagccccgaaacccaaagccaaccagcaaaagcaggacgacggccggggtctggtgcttcctggctacaagtacctcggacccttcaacggactcgacaagggggagcccgtcaacgcggcggacgcagcggccctcgagcacgacaaggcctacgaccagcagctcaaagcgggtgacaatccgtacctgcggtataaccacgccgacgccgagtttcaggagcgtctgcaagaagatacgtcttttgggggcaacctcgggcgagcagtcttccaggccaagaagcgggttctcgaacctctcggtctggttgaggaaggcgctaagacggctcctggaaagaagagaccggtagagccatcacctcagcgttcccccgactcctccacgggcatcggcaagaaaggccaccagcccgcgagaaagagactgaactttgggcagactggcgactcggagtcagtccccgaccctcaaccaatcggagaaccaccagcaggcccctctggtctgggatctggtacaatggctgcaggcggtggcgctccaatggcagacaataacgaaggcgccgacggagtgggtagttcctcaggaaattggcattgcgattccacatggctgggcgacagagtcatcaccaccagcacccgaacctgggccctgcccacctacaacaaccatctctacaagcaaatctccaacgggacatcgggaggaagcactaacgacaacacctactttggctacagcaccccctgggggtattttgacttcaacagattccactgccacttctcaccacgtgactggcagcgactcatcaacaataactggggattccggcccaagagactcaacttcaagctcttcaacatccaggtcaaggaggtcacgcagaatgaaggcaccaagaccatcgccaataaccttaccagcacgattcaggtgtttacggactcggaataccagctcccgtacgtcctcggctctgcgcaccagggctgcctccctccgttcccggcggacgtcttcatgattcctcagtacgggtatctgaccctaaacaatggcagtcaggctgtgggccgttcctccttctactgcctggaatacttcccttctcaaatgctgaggacgggcaacaactttgaattcagctacaccttcgaggacgtgcctttccacagcagctacgcgcacagccagagcctggaccggctgatgaaccctctcatcgaccagtacctgtattacttatccagaactcagtccacaggaggaactcaaggtactcagcaattgttattttctcaagccgggcccgcaaacatgtcggctcaggccaagaactggctacctggaccgtgttaccgtcagcaacgagtttccacgacactgtcgcaaaacaacaacagcaattttgcttggaccggtgccaccaagtatcacctgaatggcagagactccctggttaatcccggcgttgccatggctacccacaaggacgacgaggagcgcttcttcccgtcaagcggagttctaatgtttggcaagcagggggctggaaaagacaatgtggactacagcagcgtgatgctcaccagcgaagaagaaattaaaactactaacccagtggctacagagcagtatggtgtggtggcagacaacctgcagcagaccaacggagctcccattgtgggaactgtcaacagccagggggccttacctggtatggtctggcaaaaccgggacgtgtacctgcagggccccatctgggccaaaattcctcacacggacggcaactttcatccttcgccgctgatgggaggctttggactgaaacacccgcctcctcagatcctggtgaaaaacactcctgttcctgcggatcctccgaccaccttcagccaggccaagctggcttcttttatcacgcagtacagcaccggacaggtcagcgtggaaatcgaatgggagctgcagaaagaaaacagcaagcgctggaacccagagattcagtatacttccaactactacaaatctacaaatgtggactttgctgtcaatactgagggtacttattcagagcctcgccccattggcactcgttatctcacccgtaatctgtaattgcttgttaatcaataaaccggttaattcgtttcagttgaactttggtctctgcgaagggcgaattc

SEQ ID NO: 73 - protein, 738 aa, Adeno-associated virus
MAADGYLPDWLEDNLSEGIREWWDLKPGAPKPKANQQKQDDGRGLVLPGYKYLGPFNGLDKGEPVNAADAAALEHDKAYDQQLKAGDNPYLRYNHADAEFQERLQEDTSFGGNLGRAVFQAKKRVLEPLGLVEEGAKTAPGKKRPVEPSPQRSPDSSTGIGKKGHQPARKRLNFGQTGDSESVPDPQPIGEPPAGPSGLGSGTMAAGGGAPMADNNEGADGVGSSSGNWHCDSTWLGDRVITTSTRTWALPTYNNHLYKQISNGTSGGSTNDNTYFGYSTPWGYFDFNRFHCHFSPRDWQRLINNNWGFRPKRLNFKLFNIQVKEVTQNEGTKTIANNLTSTIQVFTDSEYQLPYVLGSAHQGCLPPFPADVFMIPQYGYLTLNNGSQAVGRSSFYCLEYFPSQMLRTGNNFEFSYTFEDVPFHSSYAHSQSLDRLMNPLIDQYLYYLSRTQSTGGTQGTQQLLFSQAGPANMSAQAKNWLPGPCYRQQRVSTTLSQNNNSNFAWTGATKYHLNGRDSLVNPGVAMATHKDDEERFFPSSGVLMFGKQGAGKDNVDYSSVMLTSEEEIKTTNPVATEQYGVVADNLQQTNGAPIVGTVNSQGALPGMVWQNRDVYLQGPIWAKIPHTDGNFHPSPLMGGFGLKHPPPQILVKNTPVPADPPTTFSQAKLASFITQYSTGQVSVEIEWELQKENSKRWNPEIQYTSNYYKSTNVDFAVNTEGTYSEPRPIGTRYLTRNL

SEQ ID NO: 74 - DNA, 3122 bp, Adeno-associated virus
gaattcgccctttctacggctgcgtcaactggaccaatgagaactttcccttcaacgattgcgtcgacaagatggtgatctggtgggaggagggcaagatgacggccaaggtcgtggagtccgccaaggccattctcggcggcagcaaggtgcgtgtggaccaaaagtgcaagtcttccgcccagatcgatcccacccccgtgatcgtcacctccaacaccaacatgtgcgccgtgattgacgggaacagcgccaccttcgagcaccagcagccgttgcaggaccggatgttcaaatttgaactcacccgccgtctggagcatgactttggcaaggtgacgaagcaggaagtcaaagagttcttccgctgggcgcaggatcacgtgaccgaggtggcgcatgagttccacgtcagaaagggtggagccaacaagagacccgcccccgatgacgcggatataagcgagcccaagcgggcctgcccctcagtcgcggatccatcgacgtcagacgcggaaggagctccggtggactttgccgacaggtaccaaaacaaatgttctcgtcacgcgggcatgcttcagatgctgtttccctgcaagacatgcgagagaatgaatcagaatttcaacatttgcttcacgcacgggaccagagactgttcagaatgtttccccggcgtgtcagaatctcaaccggtcgtcagaaagaggacgtatcggaaactctgtgcgattcatcatctgctggggcgggctcccgagattgcttgctcggcctgcgatctggtcaacgtggacctggatgactgtgtttctgagcaataaatgacttaaaccaggtatggctgccgatggttatcttccagattggctcgaggacaacctctctgagggcattcgcgagtggtgggacttgaaacctggagccccgaaacccaaagccaaccagcaaaagcaggacgacggccggggtctggtgcttcctggctacaagtacctcggacccttcaacggactcgacaagggggagcccgtcaacgcggcggacgcagcggccctcgagcacgacaaagcctacgaccagcagctcaaagcgggtgacaatccgtacctgcggtataatcacgccgacgccgagtttcaggagcgtctgcaagaagatacgtcttttgggggcaacctcgggcgagcagtcttccaggccaagaagcgggttctcgaacctctcggtctggttgaggaaggcgctaagacggctcctggaaagaagagactggtagagcagtcgccacaagagccagactcctcctcgggcatcggcaagacaggccagcagcccgctaaaaagagactcaattttggtcagactggcgactcagagtcagtccccgacccacaacctctcggagaacctccagcagccccctcaggtctgggacctaatacaatggcttcaggcggtggcgctccaatggcagacaataacgaaggcgccgacggagtgggtaattcctcgggaaattggcattgcgattccacatggctgggggacagagtcatcaccaccagcacccgaacctgggccctgcccacctacaacaaccacctctacaagcaaatctccaacggcacctcgggaggaagcaccaacgacaacacctattttggctacagcaccccctgggggtattttgacttcaacagattccactgtcacttttcaccacgtgactggcaacgactcatcaacaacaattggggattccggcccaaaagactcaacttcaagctgttcaacatccaggtcaaggaagtcacgacgaacgaaggcaccaagaccatcgccaataatctcaccagcaccgtgcaggtctttacggactcggagtaccagttaccgtacgtgctaggatccgctcaccagggatgtctgcctccgttcccggcggacgtcttcacggttcctcagtacggctatttaactttaaacaatggaagccaagccctgggacgttcctccttctactgtctggagtatttcccatcgcagatgctgagaaccggcaacaactttcagttcagctacaccttcgaggacgtgcctttccacagcagctacgcgcacagccagagcctggacaggctgatgaatcccctcatcgaccagtacctgtactacctggtcagaacgcaaacgactggaactggagggacgcagactctggcattcagccaagcgggtcctagctcaatggccaaccaggctagaaattgggtgcccggaccttgctaccggcagcagcgcgtctccacgacaaccaaccagaacaacaacagcaactttgcctggacgggagctgccaagtttaagctgaacggccgagactctctaatgaatccgggcgtggcaatggcttcccacaaggatgacgacgaccgcttcttcccttcgagcggggtcctgatttttggcaagcaaggagccgggaacgatggagtggattacagccaagtgctgattacagatgaggaagaaatcaaggctaccaaccccgtggccacagaagaatatggagcagtggccatcaacaaccaggccgccaatacgcaggcgcagaccggactcgtgcacaaccagggggtgattcccggcatggtgtggcagaatagagacgtgtacctgcagggtcccatctgggccaaaattcctcacacggacggcaactttcacccgtctcccctgatgggcggctttggactgaagcacccgcctcctcaaattctcatcaagaacacaccggttccagcggacccgccgcttaccttcaaccaggccaagctgaactctttcatcacgcagtacagcaccggacaggtcagcgtggaaatcgagtgggagctgcagaaagaaaacagcaaacgctggaatccagagattcaatacacttccaactactacaaatctacaaatgtggactttgctgtcaacacggaaggagtttatagcgagcctcgccccattggcacccgttacctcacccgcaacctgtaattacatgttaatcaataaaccggttaattcgtttcagttgaactttggtctctgcgaagggcgaattc

SEQ ID NO: 75 - protein, 736 aa, Adeno-associated virus
MAADGYLPDWLEDNLSEGIREWWDLKPGAPKPKANQQKQDDGRGLVLPGYKYLGPFNGLDKGEPVNAADAAALEHDKAYDQQLKAGDNPYLRYNHADAEFQERLQEDTSFGGNLGRAVFQAKKRVLEPLGLVEEGAKTAPGKKRLVEQSPQEPDSSSGIGKTGQQPAKKRLNFGQTGDSESVPDPQPLGEPPAAPSGLGPNTMASGGGAPMADNNEGADGVGNSSGNWHCDSTWLGDRVITTSTRTWALPTYNNHLYKQISNGTSGGSTNDNTYFGYSTPWGYFDFNRFHCHFSPRDWQRLINNNWGFRPKRLNFKLFNIQVKEVTTNEGTKTIANNLTSTVQVFTDSEYQLPYVLGSAHQGCLPPFPADVFTVPQYGYLTLNNGSQALGRSSFYCLEYFPSQMLRTGNNFQFSYTFEDVPFHSSYAHSQSLDRLMNPLIDQYLYYLVRTQTTGTGGTQTLAFSQAGPSSMANQARNWVPGPCYRQQRVSTTTNQNNNSNFAWTGAAKFKLNGRDSLMNPGVAMASHKDDDDRFFPSSGVLIFGKQGAGNDGVDYSQVLITDEEEIKATNPVATEEYGAVAINNQAANTQAQTGLVHNQGVIPGMVWQNRDVYLQGPIWAKIPHTDGNFHPSPLMGGFGLKHPPPQILIKNTPVPADPPLTFNQAKLNSFITQYSTGQVSVEIEWELQKENSKRWNPEIQYTSNYYKSTNVDFAVNTEGVYSEPRPIGTRYLTRNL

SEQ ID NO: 76 - DNA, 3117 bp, Adeno-associated virus
gaattcgcccttggctgcgtcaactggaccaatgagaactttcccttcaacgattgcgtcgacaagatggtgatctggtgggaggagggcaagatgacggccaaggtcgtggagtccgccaaggccattctcggcggcagcaaggtgcgtgtggaccaaaagtgcaagtcttccgcccagatcgatcccacccccgtgatcgtcacctccaacaccaacatgtgcgccgtgattgacgggaacagcaccaccttcgagcaccagcagccgttgcaggaccggatgttcaaatttgaactcacccgccgtctggagcatgactttggcaaggtgacgaagcaggaagtcaaagagttcttccgctgggcgcaggatcacgtgaccgaggtggcgcatgagttccacgtcagaaagggtggagccaacaagagacccgcccccgatgacgcggatataagcgagcccaagcgggcctgcccctcagtcgcggatccatcgacgtcagacgcggaaggagctccggtggactttgccgacaggtaccaaaacaaatgttctcgtcacgcgggcatgcttcagatgctgtttccctgcaagacatgcgagagaatgaatcagaatttcaacatttgcttcacgcacgggaccagagactgttcagaatgtttccccggcgtgtcagaatctcaaccggtcgtcagaaagaggacgtatcggaaactctgtgcgattcatcatctgctggggcgggctcccgagattgcttgctcggcctgcgatctggtcaacgtggacctggatgactgtgtttctgagcaataaatgacttaaaccaggtatggctgccgatggttatcttccagattggctcgaggacaacctctctgagggcattcgcgagtggtgggacttgaaacctggagccccgaaacccaaagccaaccagcaaaagcaggacgacggccggggtctggtgcttcctggctacaagtacctcggacccttcaacggactcgacaagggggagcccgtcaacgcggcggacgcagcggccctcgagcacgacaaagcctacgaccagcagctcaaagcgggtgacaatccgtacctgcggtataatcacgccgacgccgagtttcaggagcgtctgcaagaagatacgtcttttgggggcaacctcgggcgagcagtcttccaggccaagaagcgggttctcgaacctctcggtctggttgaggaaggcgctaagacggctcctggaaagaagagaccggtagagcagtcgccacaagagccagactcctcctcgggcatcggcaagacaggccagcagcccgctaaaaagagactcaattttggtcagactggcgactcagagtcagtccccgacccacaacctctcggagaacctccagcagccccctcaggtctgggacctaatacaatggcttcaggcggtggcgctccaatggcagacaataacgaaggcgccgacggagtgggtaattcctcgggaaattggcattgcgattccacatggctgggggacagagtcatcaccaccagcacccgaacctgggccctgcccacctacaacaaccacctctacaagcaaatctccaacggcacctcgggaggaagcaccaacgacaacacctattttggctacagcaccccctgggggtattttgacttcaacagattccactgtcacttttcaccacgtgactggcaacgactcatcaacaacaattggggattccggcccaaaagactcaacttcaagctgttcaacatccaggtcaaggaagtcacgacgaacgaaggcaccaagaccatcgccaataatctcaccagcaccgtgcgggtctttacggactcggagtaccagttaccgtacgtgctaggatccgctcaccagggatgtctgcctccgttcccggcggacgtcttcatggttcctcagtacggctatttaactttaaacaatggaagccaagccctgggacgttcctccttctactgtctggagtatttcccatcgcagatgctgagaaccggcaacaactttcagttcagctacaccttcgaggacgtgcctttccacagcagctacgcgcacagccagagcctggacaggctgatgaatcccctcatcgaccagtacctgtactacctggtcagaacgcaaacgactggaactggagggacgcagactctggcattcagccaagcgggtcctagctcaatggccaaccaggctagaaattgggtgcccggaccttgctaccggcagcagcgcgtctccacgacaaccaaccagagcaacaacagcaactttgcctggacgggagctgccaagtttaagctgaacggccgagactctctaatgaatccgggcgtggcaatggcttcccacaaggatgacgacgaccgcttcttcccttcgagcggggtcctgatttttggcaagcaaggagccgggaacgatggagtggattacagccaagtgctgattacagatgaggaagaaatcaaggctaccaaccccgtggccacagaagaatatggagcagtggccatcaacaaccaggccgccaatacgcaggcgcagaccggactcgtgcacaaccagggggtgattcccggcatggtgtggcagaatagagacgtgtacctgcagggtcccatctgggccaaaattcctcacacggacggcaactttcacccgtctcccctgatgggcggctttggactgaagcacccgcctcctcaaattctcatcaagaacacaccggttccagcggacccgccgcttaccttcaaccaggccaagctgaactctttcatcacgcagtacagcaccggacaggtcagcgtggaaatcgagtgggagctgcagaaagaaaacagcaaacgctggaatccagagattcaatacacttccaactactacaaatctacaaatgtggactttgctgtcaacacggaaggagtttatagcgagcctcgccccattggcacccgttacctcacccgcaacctgtaattacatgttaatcaataaaccggttaattcgtttcagttgaactttggtctctgcgaagggcgaattc

SEQ ID NO: 77 - protein, 736 aa, Adeno-associated virus
MAADGYLPDWLEDNLSEGIREWWDLKPGAPKPKANQQKQDDGRGLVLPGYKYLGPFNGLDKGEPVNAADAAALEHDKAYDQQLKAGDNPYLRYNHADAEFQERLQEDTSFGGNLGRAVFQAKKRVLEPLGLVEEGAKTAPGKKRPVEQSPQEPDSSSGIGKTGQQPAKKRLNFGQTGDSESVPDPQPLGEPPAAPSGLGPNTMASGGGAPMADNNEGADGVGNSSGNWHCDSTWLGDRVITTSTRTWALPTYNNHLYKQISNGTSGGSTNDNTYFGYSTPWGYFDFNRFHCHFSPRDWQRLINNNWGFRPKRLNFKLFNIQVKEVTTNEGTKTIANNLTSTVRVFTDSEYQLPYVLGSAHQGCLPPFPADVFMVPQYGYLTLNNGSQALGRSSFYCLEYFPSQMLRTGNNFQFSYTFEDVPFHSSYAHSQSLDRLMNPLIDQYLYYLVRTQTTGTGGTQTLAFSQAGPSSMANQARNWVPGPCYRQQRVSTTTNQSNNSNFAWTGAAKFKLNGRDSLMNPGVAMASHKDDDDRFFPSSGVLIFGKQGAGNDGVDYSQVLITDEEEIKATNPVATEEYGAVAINNQAANTQAQTGLVHNQGVIPGMVWQNRDVYLQGPIWAKIPHTDGNFHPSPLMGGFGLKHPPPQILIKNTPVPADPPLTFNQAKLNSFITQYSTGQVSVEIEWELQKENSKRWNPEIQYTSNYYKSTNVDFAVNTEGVYSEPRPIGTRYLTRNL

SEQ ID NO: 78 - DNA, 3121 bp, Adeno-associated virus
gaattcgcccttctacggctgcgtcaactggaccaatgagaactttcccttcaacgattgcgtcgacaagatggtgatctggtgggaggagggcaagatgacggccaaggtcgtggagtccgccaaggccattctcggcggcagcaaggtgcgtgtggaccaaaagtgcaagtcttccgcccagatcgatcccacccccgtgatcgtcacctccaacaccaacatgtgcgccgtgattgacgggaacagcaccaccttcgagcaccagcagccgttgcaggaccggatgttcaaatttgaactcacccgccgtctggagcatgactttggcaaggtgacgaagcaggaagtcaaagagttcttccgctgggcgcaggatcacgtgaccgaggtggcgcatgagttccacgtcagaaagggtggcgccaacaagagacccgcccccgatgacgcggatataagcgagcccaagcgggcctgcccctcagtcgcggatccatcgacgtcagacgcggaaggagctccggtggactttgccgacaggtaccaaaacaaatgttctcgtcacgcgggcatgcttcagatgctgtttccctgcaagacatgcgagagaatgaatcagaatttcaacatttgcttcacgcacgggaccagagactgttcagaatgtttccccggcgtgtcagaatctcaaccggtcgtcagaaagaggacgtatcggaaactctgtgcgattcatcatctgctggggcgggctcccgagattgcttgctcggcctgcgatctggtcaacgtggacctggatgactgtgtttctgagcaataaatgacttaaaccaggtatggctgccgatggttatcttccagattggctcgaggacaacctctctgagggcattcgcgagtggtgggacttgaaacctggagccccgaaacccaaagccaaccagcaaaagcaggacgacggccggggtctggtgcttcctggctacaagtacctcggacccttcaacggactcgacaagggggagcccgtcaacgcggcggacgcagcggccctcgagcacgacaaagcctacgaccagcagctcaaagcgggtgacaatccgtacctgcggtataatcacgccgacgccgagtttcaggagcgtctgcaagaagatacgtcctttgggggcaacctcgggcgagcagtcttccaggccaagaagcgggttctcgaacctctcggtctggttgaggaaggcgctaagacggctcctggaaagaagagaccggtagagcagtcgccacaagagccagactcctcctcgggcatcggcaagacaggccagcagcccgctaaaaagagactcaattttggtcagactggcgactcagagtcagtccccgacccacaacctctcggagaacctccagcagccccctcaggtctgggacctaatacaatggcttcaggcggtggcgctccaatggcagacaataacgaaggcgccgacggagtgggtaattcctcgggaaattggcattgcgattccacatggctgggggacagagtcatcaccaccagcacccgaacctgggccctgcccacctacaacaaccacctctacaagcaaatctccaacggcacctcgggaggaagcaccaacgacaacacctattttggctacagcaccccctgggggtattttgacttcaacagattccactgtcacttttcaccacgtgactggcaacgactcatcaacaacaattggggattccggcccaaaagactcaacttcaagctgttcaacatccaggtcaaggaagtcacgacgaacgaaggcaccaagaccatcgccaataatctcaccagcaccgtgcaggtctttacggacttggagtaccagttaccgtacgtgctaggatccgctcaccagggatgtctgcctccgttcccggcggacgtcttcatggttcctcagtacggctatttaactttaaacaatggaagccaagccctgggacgttcctccttctactgtctggagtatttcccatcgcagatgccgagaaccggcaacaactttcagttcagctacaccttcgaggacgtgcctttccacagcagctacgcgcacagccagagcctggacaggctgatgaatcccctcatcgaccagtacctgtactacctggtcagaacgcaaacgactggaactggagggacgcagactctggcattcagccaagcgggtcctagctcaatggccaaccaggctagaaattgggtgcccggaccttgctaccggcagcagcgcgtctccacgacaaccaaccagaacaacaacagcaactttgcctggacgggagctgccaagtttaagctgaacggccgagactctctaatgaatccgggcgtggcaatggcttcccacaaggatgacgacgaccgcttcttcccttcgagcggggtcctgatttttggcaagcaaggagccgggaacgatggagtggattacagccaagtgctgattacagatgaggaagaaatcaaggctaccaaccccgtggccacagaagaatatggagcagtggccatcaacaaccaggccgccaatacgcaggcgcagaccggactcgtgcacaaccagggggtgattcccggcatggtgtggcagaatagagacgtgtacctgcagggtcccatctgggccaaaattcctcacacggacggcaactttcacccgtctcccctgatgggcggctttggactgaagcacccgcctcctcaaattctcatcaagaacacaccggttccagcggacccgccgcttaccttcaaccaggccaagctgaactctttcatcacgcagtacagcaccggacaggtcagcgtggaaatcgagtgggagctgcagaaagaaaacagcaaacgctggaatccagagattcaatacacttccaactactacaaatctacaaatgtggactttgctgtcaacacggaaggagtttatagcgagcctcgccccattggcacccgttacctcacccgcaacctgtaattacatgttaatcaataaaccggttaattcgtttcagttgaactttggtctctgcgaagggcgaattc

SEQ ID NO: 79 - protein, 736 aa, Adeno-associated virus
MAADGYLPDWLEDNLSEGIREWWDLKPGAPKPKANQQKQDDGRGLVLPGYKYLGPFNGLDKGEPVNAADAAALEHDKAYDQQLKAGDNPYLRYNHADAEFQERLQEDTSFGGNLGRAVFQAKKRVLEPLGLVEEGAKTAPGKKRPVEQSPQEPDSSSGIGKTGQQPAKKRLNFGQTGDSESVPDPQPLGEPPAAPSGLGPNTMASGGGAPMADNNEGADGVGNSSGNWHCDSTWLGDRVITTSTRTWALPTYNNHLYKQISNGTSGGSTNDNTYFGYSTPWGYFDFNRFHCHFSPRDWQRLINNNWGFRPKRLNFKLFNIQVKEVTTNEGTKTIANNLTSTVQVFTDLEYQLPYVLGSAHQGCLPPFPADVFMVPQYGYLTLNNGSQALGRSSFYCLEYFPSQMPRTGNNFQFSYTFEDVPFHSSYAHSQSLDRLMNPLIDQYLYYLVRTQTTGTGGTQTLAFSQAGPSSMANQARNWVPGPCYRQQRVSTTTNQNNNSNFAWTGAAKFKLNGRDSLMNPGVAMASHKDDDDRFFPSSGVLIFGKQGAGNDGVDYSQVLITDEEEIKATNPVATEEYGAVAINNQAANTQAQTGLVHNQGVIPGMVWQNRDVYLQGPIWAKIPHTDGNFHPSPLMGGFGLKHPPPQILIKNTPVPADPPLTFNQAKLNSFITQYSTGQVSVEIEWELQKENSKRWNPEIQYTSNYYKSTNVDFAVNTEGVYSEPRPIGTRYLTRNL

SEQ ID NO: 80 - DNA, 3122 bp, Adeno-associated virus
gaattcgccctttctacggctgcgtcaactggaccaatgagaactttcccttcaacgattgcgtcgacaagatggtgatctggtgggaggagggcaagatgacggccaaggtcgtggagtccgccaaggccattctcggcggcagcaaggtgcgtgtggaccaaaagtgcaagtcttccgcccagatcgatcccacccccgtgatcgtcacctccaacaccaacatgtgcgccgtgattgacgggaacagcaccaccttcgagcaccagcagccgttgcaggaccggatgttcaaatttgaactcacccgccgtctggagcatgactttggcaaggtgacgaagcaggaagtcaaagggttcttccgctgggcgcaggatcacgtgaccgaggtggcgcatgagttccacgtgcgagcccaagcgggcctgcccctcagtcgcggatccatcgacgtcagaccagaaagggtggagccaacaagagacccgcccccgatgacgcggatataagcggaaggagctccggtggactttgccgacaggtaccaaaacaaatgttctcgtcacgcgggcatgcttcagatgctgtttccctgcaagacatgcgagagaatgaatcagaatttcaacatttgcttcacgcacgggaccagagactgttcagaatgtttccccggcgtgtcagaatctcaaccggtcgtcagaaagaggacgtatcggaaactctgtgcgattcatcatctgctggggcgggctcccgagattgcttgctcggcctgcgatctggtcaacgtggacctggatgactgtgtttctgagcaataaatgacttaaaccaggtatggctgccgatggttatcttccagattggctcgaggacaacctctctgagggcattcgcgagtggtgggacttgaaacctggagccccgaaacccaaagccaaccagcaaaagcaggacgacggccggggtctggtgcttcctggctacaagtacctcggacccttcaacggactcgacaagggggagcccgtcaacgcggcggacgcagcggccctcgagcacgacaaagcctacgaccagcagctcaaagcgggtgacaatccgtacctgcggtataatcacgccgacgccgagtttcaggagcgtctgcaagaagatacgtcttttgggggcaacctcgggcgagcagtcttccaggccaagaagcgggttctcgaacctctcggtctggttgaggaaggcgctaagacggctcctggaaagaagagaccggtagagcagtcgccacaagagccagactcctcctcgggcatcggcaagacaggccagcagcccgctaaaaagagactcaattttggtcagactggcgactcagagtcagtccccgacccacaacctctcggagaacctccagcagccccctcaggtctgggacctaatacaatggcttcaggcggtggcgctccaatggcagacaataacgaaggcgccgacggagtgggtaattcctcgggaaattggcattgcgattccacatggctgggggacagagtcatcaccaccagcacccgaacctgggccctgcccacctacaacaaccacctctacaagcaaatctccaacggcacctcgggaggaagcaccaacgacaacacctattttggctacagcaccccctgggggtattttgacttcaacagattccactgtcacttttcaccacgtgactggcaacgactcatcaacaacaattggggattccggcccaaaagactcaacttcaagctgttcaacatccaggtcaaggaagtcacgacgaacgaaggcaccaagaccatcgccaataatctcaccagcaccgtgcaggtctttacggactcggagtaccagttaccgtacgtgctaggatccgctcaccagggatgtctgcctccgttcccggcggacgtcttcatggttcctcagtacggctatttaactttaaacaatggaagccaagccctgggacgttcctccttctactgtctggagtatttcccatcgcagatgctgagaaccggcaacaactttcagttcagctacaccttcgaggacgtgcctttccacagcagctacgcgcacagccagagcctggacaggctgatgaatcccctcatcgaccagtacctgtactacctggtcagaacgcaaacgactggaactggagggacgcagactctggcattcagccaagcgggtcctagctcaatggccaaccaggctagaaattgggtgcccggaccttgctaccggcagcagcgcgtctccacgacaaccaaccagaacaacaacagcaactttgcctggacgggagctgccaagtttaagctgaacggccgagactctctaatgaatccgggcgtggcaatggcttcccacaaggatgacgacgaccgcttcttcccttcgagcggggtcctgatttttggcaagcaaggagccgggaacgatggagtggattacagccaagtgctgattacagatgaggaagaaatcaaggctaccaaccccgtggccacagaagaatatggagcagtggccatcaacaaccaggccgccaatacgcaggcgcagaccggactcgtgcacaaccagggggtgattcccggcatggtgtggcagaatagagacgtgtacctgcagggtcccatctgggccaaaattcctcacacggacggcaactttcacccgtctcccctgatgggcggctttggactgaagcacccgcctcctcaaattctcatcaagaacacaccggttccagcggacccgccgcttaccttcaaccaggccaagctgaactctttcatcacgcagtacagcaccggacaggtcagcgtggaaatcgagtgggagctgcagaaagaaaacagcaaacgctggaatccagagattcaatacacttccaactactacaaatctacaaatgtggactttgctgtcaacacggagggggtttatagcgagcctcgccccattggcacccgttacctcacccgcaacctgtaattacatgttaatcaataaaccggttaattcgtttcagttgaactttggtctctgcgaagggcgaattc

SEQ ID NO: 81 - protein, 736 aa, Adeno-associated virus
MAADGYLPDWLEDNLSEGIREWWDLKPGAPKPKANQQKQDDGRGLVLPGYKYLGPFNGLDKGEPVNAADAAALEHDKAYDQQLKAGDNPYLRYNHADAEFQERLQEDTSFGGNLGRAVFQAKKRVLEPLGLVEEGAKTAPGKKRPVEQSPQEPDSSSGIGKTGQQPAKKRLNFGQTGDSESVPDPQPLGEPPAAPSGLGPNTMASGGGAPMADNNEGADGVGNSSGNWHCDSTWLGDRVITTSTRTWALPTYNNHLYKQISNGTSGGSTNDNTYFGYSTPWGYFDFNRFHCHFSPRDWQRLINNNWGFRPKRLNFKLFNIQVKEVTTNEGTKTIANNLTSTVQVFTDSEYQLPYVLGSAHQGCLPPFPADVFMVPQYGYLTLNNGSQALGRSSFYCLEYFPSQMLRTGNNFQFSYTFEDVPFHSSYAHSQSLDRLMNPLIDQYLYYLVRTQTTGTGGTQTLAFSQAGPSSMANQARNWVPGPCYRQQRVSTTTNQNNNSNFAWTGAAKFKLNGRDSLMNPGVAMASHKDDDDRFFPSSGVLIFGKQGAGNDGVDYSQVLITDEEEIKATNPVATEEYGAVAINNQAANTQAQTGLVHNQGVIPGMVWQNRDVYLQGPIWAKIPHTDGNFHPSPLMGGFGLKHPPPQILIKNTPVPADPPLTFNQAKLNSFITQYSTGQVSVEIEWELQKENSKRWNPEIQYTSNYYKSTNVDFAVNTEGVYSEPRPIGTRYLTRNL

SEQ ID NO: 82 - DNA, 2370 bp, Adeno-associated virus
gaattcgccctttctacggctgcgtcaactggaccaatgagaactttcccttcaacgattgcgtcgacaagatggtgatctggtgggaggagggcaagatgacggccaaggtcgtggagtccgccaaggccattctcggcggcagcaaggtgcgcgtggaccaaaagtgcaagtcgtccgcccagatcgaccccacccccgtgatcgtcacctccaacaccaacatgtgcgccgtgattgacgggaacagcaccaccttcgagcaccagcagccgttgcaggaccggatgttcaagttcgaactcacccgccgtctggagcacgactttggcaaggtgaccaagcaggaagtcaaagagttcttccgctgggcgcaggatcacgtgaccgaggtggcgcatgagttctacgtcagaaagggcggagccagcaaaagacccgcccccgatgacgcggatataagcgagcccaagcgggcctgcccctcagtcgcggatccatcgacgtcagacgcggaaggagctccggtggactttgccgacaggtaccaaaacaaatgttctcgtcacgcgggcatgcttcagacgctgtttccctgcaaaacgtgcgagagaatgaatcagaatttcaacatttgcttcacgcacggggtcagagactgctcagaatgtttccccggtgcatcagaatctcaaccggtcgtcagaaaaaaaacgtatcagaaactgtgtgccattcatcatctgctggggcgggcacccgagattgcttgctcggcctgcgatctggtcaacgtggacctggacgactgtgtttctgagcaataaatgacttaaaccaggtatggctgccgatggttatcttccagattggcttgaggacaacctctctgagggcattcgcgagtggtgggacctgaaacctggagccccgaaacccaaagccaaccagcaaaagcaggacgacggccggggtctggtgcttcctggctacaagtacctcggacccttcaacggactcgacaagggggagcccgtcaacgcggcggacgcagcggccctcgagcacgacaaggcctacgaccagcagctcaaagcgggtgacaatccgtacctgcggtataaccacgccgacgccgagtttcaggagcgtctgcaagaagatacgtcttttgggggcaacctcgggcgagcagtcttccaggccaagaagcgggttctcgaacctctcggtctggttgaggaaggcgctaagacggctcctggaaagaagagaccggtagagccatcacctcagcgttcccccgactcctccacgggcatcggcaagaaaggccaccagcccgcgagaaagagactgaactttgggcagactggcgactcggagtcagtccccgaccctcaaccaatcggagaaccaccagcaggcccctctggtctgggatctggtacaatggctgcaggcggtggcgctccaatggcagacaataacgaaggcgccgacggagtgggtagttcctcaggaaattggcattgcgattccacatggctgggcgacagagtcatcaccaccagcacccgaacctgggccctgcccacctacaacaaccatctctacaagcaaatctccaacgggacatcgggaggaagcactaacgacaacacctactttggctacagcaccccctgggggtattttgacttcaacagattccactgccacttctcaccacgtgactggcagcgactcatcaacaataactggggattccggcccaagagactcaacttcaagctcttcaacatccaggtcaaggaggtcacgcagaatgaaggcaccaagaccatcgccaataaccttaccagcacgattcaggtgtttacggactcggaataccagctcccgtacgtcctcggctctgcgcaccagggctgcctccctccgttcccggcggacgtcttcatgattcctcagtacgggtatctgaccctaaacaatggcagtcaggctgtgggccgttcctccttctactgcctggaatacttcccttctcaaatgctgaggacgggcaacaactttgaattcagctacaccttcgaggacgtgcctttccacagcagctacgcgcacagccagagcctggaccggctgatgaaccctctcatcgaccagtacctgtattacttatccagaactcagtccacaggaggaactcaaggtactcagcaattgttattttctcaagccgggcccgcaaacatgtyggctcaggccaagaactggctacctggaccgtgttaccgtcagcaacgagtttccacgacactgtcgcaaaacaacaacagcaattttgctggaccggtgccacca

SEQ ID NO: 83 - protein, 738 aa, Adeno-associated virus; identical to SEQ ID NO: 73

SEQ ID NO: 84 - DNA, 2205 bp, Adeno-associated virus
atgactgacggttaccttccagattggctagaggacaacctctctgaaggcgttcgagagtggtgggcgctgcaacctggagcccctaaacccaaggcaaatcaacaacatcaggacaacgctcggggtcttgtgcttccgggttacaaatacctcggacccggcaacggactcgacaagggggaacccgtcaacgcagcggacgcggcagccctcgagcacgacaaggcctacgaccagcagctcaaggccggtgacaacccctacctcaagtacaaccacgccgacgcggagttccagcagcggcttcagggcgacacatcgtttgggggcaacctcggcagagcagtcttccaggccaaaaagagggttcttgaacctcttggtctggttgagcaagcgggtgagacggctcctggaaagaagagaccgttgattgaatccccccagcagcccgactcctccacgggtatcggcaaaaaaggcaagcagccggctaaaaagaagctcgttttcgaagacgaaactggagcaggcgacggaccccctgagggatcaacttccggagccatgtctgatgacagtgagatgcgtgcagcagctggcggagctgcagtcgagggcggacaaggtgccgatggagtgggtaatgcctcgggtgattggcattgcgattccacctggtctgagggccacgtcacgaccaccagcaccagaacctgggtcttgcccacctacaacaaccacctctacaagcgactcggagagagcctgcagtccaacacctacaacggattctccaccccctggggatactttgacttcaaccgcttccactgccacttctcaccacgtgactggcagcgactcatcaacaacaactggggcatgcgacccaaagccatgcgggtcaaaatcttcaacatccaggtcaaggaggtcacgacgtcgaacggcgagacaacggtggctaataaccttaccagcacggttcagatctttgcggactcgtcgtacgaactgccgtacgtgatggatgcgggtcaagagggcagcctgcctccttttcccaacgacgtctttatggtgccccagtacggctactgtggactggtgaccggcaacacttcgcagcaacagactgacagaaatgccttctactgcctggagtactttccttcgcagatgctgcggactggcaacaactttgaaattacgtacagttttgagaaggtgcctttccactcgatgtacgcgcacagccagagcctggaccggctgatgaaccctctcatcgaccagtacctgtggggactgcaatcgaccaccaccggaaccaccctgaatgccgggactgccaccaccaactttaccaagctgcggcctaccaacttttccaactttaaaaagaactggctgcccgggccttcaatcaagcagcagggcttctcaaagactgccaatcaaaactacaagatccctgccaccgggtcagacagtctcatcaaatacgagacgcacagcactctggacggaagatggagtgccctgacccccggacctccaatggccacggctggacctgcggacagcaagttcagcaacagccagctcatctttgcggggcctaaacagaacggcaacacggccaccgtacccgggactctgatcttcacctctgaggaggagctggcagccaccaacgccaccgatacggacatgtggggcaacctacctggcggtgaccagagcaacagcaacctgccgaccgtggacagactgacagccttgggagccgtgcctggaatggtctggcaaaacagagacatttactaccagggtcccatttgggccaagattcctcataccgatggacactttcacccctcaccgctgattggtgggtttgggctgaaacacccgcctcctcaaatttttatcaagaacaccccggtacctgcgaatcctgcaacgaccttcagctctactccggtaaactccttcattactcagtacagcactggccaggtgtcggtgcagattgactgggagatccagaaggagcggtccaaacgctggaaccccgaggtccagtttacctccaactacggacagcaaaactctctgttgtgggctcccgatgcggctgggaaatacactgagcctagggctatcggtacccgctacctcacccaccacctgtaa

SEQ ID NO: 85 - protein, 734 aa, Adeno-associated virus; identical to SEQ ID NO: 57

SEQ ID NO: 86 - DNA, 3128 bp, Adeno-associated virus
gaattcgccctttctacggctgcgtcaactggaccaatgagaactttcccttcaacgattgcgtcgacaagatgttgatctggtgggaggagggcaagatgacggccaaggtcgtggagtccgccaaggccattctcggcggcagcaaagtgcgcgtggaccaaaagtgcaagccgtccgcccagatcgaccccacccccgtgatcgtcacctccaacaccaacatgtgcgccgtgattgacgggaacagcaccaccttcgagcaccagcagccgttgcgggaccggatgttcaagtttgaactcacccgccgtctggagcacgactttggcaaggtgacaaagcaggaagtcagagagttcttccgctgggcgcaggatcacgtgaccgaggtggcgcacgagttctacgtcagaaagggtggagccaacaagagacccgcccccgatgacgcggataaaagcgagcccaagcgggcctgcccctcagtcgcggatccatcgacgtcagacgcggaaggagctccggtggactttgccgacaggtaccaaaacaaatgttctcgtcacgcgggcatgcttcagatgctgtttccctgcaaaacatgcgagagaatgaatcagaatttcaacatttgcttcacgcacgggaccagagactgttcagaatgtttccccggcgtgtcagaatctcaaccggtcgtcagaaaaaagacgtatcggaaactctgtgcgattcatcatctgctggggcgggcacccgagattgcttgctcggcctgcgatctggtcaacgtggacctagatgactgtgtttctgagcaataaatgacttaaaccaggtatggctgccgatggttatcttccagattggctcgaggacaacctctctgagggcattcgcgagtggtgggacttgaaacctggagccccgaaacccaaagccaaccagcaaaagcaggacgacggccggggtctggtgcttcctggctacaagtacctcggacccttcaacggactcgacaagggggagcccgtcaacgcggcggacgcagcggccctcgagcacgacaaggcctacgaccagcagctcaaagcgggtgacaatccgtacctgcggtataaccacgccgacgccgagtttcaggagcgtctgcaagaagatacgtcttttgggggcaacctcgggcgagcagtcttccaggccaagaagcgggttctcgaacctctcggtctggttgaggaaggcgctaagacggctcctggaaagaagagaccggtagagccatcaccccagcgttctccagactcctctacgggcatcggcaagaaaggccagcagcccgcgaaaaagagactcaactttgggcagactggcgactcagagtcagtgcccgaccctcaaccaatcggagaaccccccgcaggcccctctggtctgggatctggtacaatggctgcaggcggtggcgctccaatggcagacaataacgaaggcgccgacggagtgggtagttcctcaggaaattggcattgcgattccacatggctgggcgacagagtcatcaccaccagcacccgaacctgggccctccccacctacaacaaccacctctacaagcaaatctccaacgggacttcgggaggaagcaccaacgacaacacctacttcggctacagcaccccctgggggtattttgactttaacagattccactgccacttctcaccacgtgactggcagcgactcatcaacaacaactggggattccggcccaagagactcaacttcaagctcttcaacatccaggtcaaggaggtcacgcagaatgaaggcaccaagaccatcgccaataaccttaccagcacgattcaggtctttacggactcggaataccagctcccgtacgtcctcggctctgcgcaccagggctgcctgcctccgttcccggcggacgtcttcatgattcctcagtacgggtacctgactctgaacaatggcagtcaggccgtgggccgttcctccttctactgcctggagtactttccttctcaaatgctgagaacgggcaacaactttgagttcagctaccagtttgaggacgtgccttttcacagcagctacgcgcacagccaaagcctggaccggctgatgaaccccctcatcgaccagtacctgtactacctgtctcggactcagtccacgggaggtaccgcaggaactcagcagttgctattttctcaggccgggcctaataacatgtcggctcaggccaaaaactggctacccgggccctgctaccggcagcaacgcgtctccacgacactgtcgcaaaataacaacagcaactgtaaatcccggtgtcgctatggcaacccacaaggacgacgaagagcgattttgcctggaccggtgccaccaagtatcatctgaatggcagagactctctgttttccgtccagcggagtcttaatgtttgggaaacagggagctggaaaagacaacgtggactatagcagcgttatgctaaccagtgaggaagaaattaaaaccaccaacccagtggccacggaacagtacggcgtggtggccgataacctgcaacagcaaaacgccgctcctattgtaggggccgtcaacagtcaaggagccttacctggcatggtctggcagaaccgggacgtgtacctgcagggtcctatctgggccaagattcctcacacggacggaaactttcatccctcgccgctgatgggaggctttggactgaaacacccgcctcctcagatcctgattaagaatacacctgttcccgcggatcctccaactaccttcagtcaagctaagctggcgtcgttcatcacgcagtacagcaccggacaggtcagcgtggaaattgaatgggagctgcagaaagaaaacagcaaacgctggaacccagagattcaatacacttccaactactacaaatctacaaatgtggacttcgctgttaacacagatggcacttattctgagcctcgccccattggcacccgttacctcacccgtaatctgtaattgctcgttaatcaataaaccggttgattcgtttcagttgaactttggtctctgcgaagggcgaattc

SEQ ID NO: 87 - protein, 738 aa, Adeno-associated virus; identical to SEQ ID NO: 7

SEQ ID NO: 88 - DNA, 3128 bp, Adeno-associated virus
gaattcgccctttctacggctgcgtcaactggaccaatgagaactttcccttcaacgattgcgtcgacaagatggtgatctggtgggaggagggcaagatgacggccaaggtcgtggagtccgccaaggccattctcggcggcagcaaagtgcgcgtggaccaaaagtgcaagtcgtccgcccagatcgaccccacccccgtgatcgtcacctccaacaccaacatgtgcgccgtgattgacgggaacagcaccaccttcgagcaccagcagccgttgcaggaccggatgttcaagtttgaactcacccgccgtctggagcacgactttggcaaggtgacaaagcaggaagtcagagagttcttccgctgggcgcaggatcacgtgaccgaggtggcgcacgagttctacgtcagaaagggtggagccaacaagagacccgcccccgatgacgcggataaaagcgagcccaagcgggcctgcccctcagtcgcggatccatcgacgtcagacgcggaaggagctccggtggactttgccgacaggtaccaaaacaaatgttctcgtcacgcgggcatgcttcagatgctgtttccctgcaaaacatgcgagagaatgaatcagaatttcaacatttgcttcacgcacgggaccagagactgttcagaatgtttccccggcgtgtcagaatctcaaccggttgtcagaaaaaagacgtatcggaaactctgtgcgattcatcatctgctggggcgggcacccgagattgcttgctcggcctgcgatctggtcaacgtggacctagatgactgtgtttctgagcaataaatgacttaaaccaggtatggctgccgatggttatcttccagattggctcgaggacaacctctctgagggcattcgcgagtggtgggacttgaaacctggagccccgaaacccaaagccaaccagcaaaagcaggacgacggccggggtctggtgcttcctggctacaagtacctcggacccttcaacggactcgacaagggggagcccgtcaacgcggcggacgcagcggccctcgagcacgacaaggcctacgaccagcagctcaaagcgggtgacaatccgtacctgcggtataaccacgccgacgccgagtttcaggagcgtctgcaagaagatacgtcttttgggggcaacctcgggcgagcagtcttccaggccaagaagcgggttctcgaacctctcggtctggttgaggaaggcgctaagacggctcctggaaagaagagaccggtagagccatcaccccagcgttctccagactcctctacgggcatcggcaagaaaggccagcagcccgcgaaaaagagactcaactttgggcagactggcgactcagagtcagtgcccgaccctcaaccaatcggagaaccccccgcaggcccctctggtctgggatctggtacaatggctgcaggcggtggcgctccaatggcagacaataacgaaggcgccgacggagtgggtagttcctcaggaaattggcattgcgattccacatggctgggcgacagagtcatcaccaccagcacccgaacctgggccctccccacctacaacaaccacctctacaagcaaatctccaacgggacttcgggaggaagcaccaacgacaacacctacttcggctacagcaccccctgggggtattttgactttaacagattccactgccacttctcaccacgtgactggcagcgactcatcaacaacaactggggattccggcccaagagacccaacttcaagctcttcaacatccaggtcaaggaggtcacgcagaatgaaggcaccaagaccatcgccaataaccttaccagcacgattcaggtctttacggactcggaataccagctcccgtacgtcctcggctctgcgcaccagggctgcctgcctccgttcccggcggacgtcttcatgattcctcagtacgggtacctgactctgaacaatggcagtcaggccgtgggccgttcctccttctactgcctggagtactttccttctcaaatgctgagaacgggcaacaactttgagttcagctaccagtttgaggacgtgccttttcacagcagctacgcgcacagccaaagcctggaccggctgatgaaccccctcatcgaccagtacctgtactacctgtctcggactcagtccacgggaggtaccgcaggaactcagcagttgctattttctcaggccgggcctaataacatgtcggctcaggccaaaaactggctacccgggccctgctaccggcagcaacgcgtctccacgacactgtcgcaaaataacaacagcaactttgcctggaccggtgccaccaagtatcatctgaatggcagagactctctggtaaatcccggtgtcgctatggcaacccacaaggacgacgaagagcgattttttccgtccagcggagtcttaatgtttgggaaacagggagctggaaaagacaacgtggactatagcagcgttatgctaaccagtgaggaagaaattaaaaccaccaacccagtggccacagaacagtacggcgtggtggccgataacctgcaacagcaaaacgccgctcctattgtaggggccgtcaacagtcaaggagccttacctggcatggtctggcagaaccgggacgtgtacctgcagggtcctatctgggccaagattcctcacacggacggaaactttcatccctcgccgctgatgggaggctttggactgaaacacccgcctcctcagatcctgattaagaatacacctgttcccgcggatcctccaactaccttcagtcaagctaagctggcgtcgttcatcacgcagtacagcaccggacaggtcagcgtggaaattgaatgggagctgcagaaagaaaacagcaaacgctggaacccagagattcaatacacttccaactactacaaatctacaaatgtggactttgctgttaacacagatggcacttattctgagcctcgccccattggcacccgttacctcacccgtaatctgtaattgcttgttaatcaataaaccggttgattcgtttcagttgaactttggtctctgcgaagggcgaattc

SEQ ID NO: 89 - protein, 738 aa, Adeno-associated virus
MAADGYLPDWLEDNLSEGIREWWDLKPGAPKPKANQQKQDDGRGLVLPGYKYLGPFNGLDKGEPVNAADAAALEHDKAYDQQLKAGDNPYLRYNHADAEFQERLQEDTSFGGNLGRAVFQAKKRVLEPLGLVEEGAKTAPGKKRPVEPSPQRSPDSSTGIGKKGQQPAKKRLNFGQTGDSESVPDPQPIGEPPAGPSGLGSGTMAAGGGAPMADNNEGADGVGSSSGNWHCDSTWLGDRVITTSTRTWALPTYNNHLYKQISNGTSGGSTNDNTYFGYSTPWGYFDFNRFHCHFSPRDWQRLINNNWGFRPKRPNFKLFNIQVKEVTQNEGTKTIANNLTSTIQVFTDSEYQLPYVLGSAHQGCLPPFPADVFMIPQYGYLTLNNGSQAVGRSSFYCLEYFPSQMLRTGNNFEFSYQFEDVPFHSSYAHSQSLDRLMNPLIDQYLYYLSRTQSTGGTAGTQQLLFSQAGPNNMSAQAKNWLPGPCYRQQRVSTTLSQNNNSNFAWTGATKYHLNGRDSLVNPGVAMATHKDDEERFFPSSGVLMFGKQGAGKDNVDYSSVMLTSEEEIKTTNPVATEQYGVVADNLQQQNAAPIVGAVNSQGALPGMVWQNRDVYLQGPIWAKIPHTDGNFHPSPLMGGFGLKHPPPQILIKNTPVPADPPTTFSQAKLASFITQYSTGQVSVEIEWELQKENSKRWNPEIQYTSNYYKSTNVDFAVNTDGTYSEPRPIGTRYLTRNL

SEQ ID NO: 90 - protein, 738 aa, Adeno-associated virus
MAADGYLPDWLEDNLSEGIREWWDLKPGAPKPKANQQKQDDGRGLVLPGYKYLGPFNGLDKGEPVNAADAAALEHDKAYDQQLKAGDNPYLRYNHADAEFQERLQEDTSFGGNLGRAVFQAKKRVLEPLGLVEEAAKTAPGKKRPVEPSPQRSPDSSTGIGKKGQQPAKKRLNFGQTGDSESVPDPQPIGEPPAGPSGLGSGTMAAGGGAPMADNNEGADGVGSSSGNWHCDSTWLGDRVITTSTRTWALPTYNNHLYKQISNGTSGGSTNDNTYFGYSTPWGYFDFNRFHCHFSPRDWQRLINNNWGFRPKRLSFKLFNIQVKEVTQNEGTKTIANNLTSTIQVFTDSEYQLPYVLGSAHQGCLPPFPADVFMIPQYGYLTLNNGSQAVGRSSFYCLEYFPSQMLRTGNNFEFSYTFEDVPFHSSYAHSQSLDRLMNPLIDQYLYYLSRTQSTGGTQGTQQLLFSQAGPANMSAQAKNWLPGPCYRQQRVSTTLSQNNNSNFAWTGATKYHLNGRDSLVNPGVAMATHKDDEERFFPSSGVLMFGKQGAGRDNVDYSSVMLTSEEEIKTTNPVATEQYGVVADNLQQTNTGPIVGNVNSQGALPGMVWQNRDVYLQGPIWAKIPHTDGNFHPSPLMGGFGLKHPPPQILIKNTPVPADPPTTFSQAKLASFITQYSTGQVSVEIEWELQKENSKRWNPEIQYTSNYYKSTNVDFAVNTEGTYSEPRPIGTRYLTRNL

SEQ ID NO: 91 - DNA, 2172 bp, Artificial Sequence
  Description of Artificial Sequence: Synthetic polynucleotide
atgtcttttgttgatcaccctccagattggttggaagaagttggtgaaggtcttcgcgagtttttgggccttgaagcgggcccaccgaaaccaaaacccaatcagcagcatcaagatcaagcccgtggtcttgtgctgcctggttataactatctcggacccggaaacggtctcgatcgaggagagcctgtcaacagggcagacgaggtcgcgcgagagcacgacatctcgtacaacgagcagcttgaggcgggagacaacccctacctcaagtacaaccacgcggacgccgagtttcaggagaagctcgccgacgacacatccttcgggggaaacctcggaaaggcagtctttcaggccaagaaaagggttctcgaaccttttggcctggttgaagagggtgctaagacggcccctaccggaaagcggatagacgaccactttccaaaaagaaagaaggctcggaccgaagaggactccaagccttccacctcgtcagacgccgaagctggacccagcggatcccagcagctgcaaatcccagcccaaccagcctcaagtttgggagctgatacaatgtctgcgggaggtggcggcccattgggcgacaataaccaaggtgccgatggagtgggcaatgcctcgggagattggcattgcgattccacgtggatgggggacagagtcgtcaccaagtccacccgaacctgggtgctgcccagctacaacaaccaccagtaccgagagatcaaaagcggctccgtcgacggaagcaacgccaacgcctactttggatacagcaccccctgggggtactttgactttaaccgcttccacagccactggagcccccgagactggcaaagactcatcaacaactactggggcttcagaccccggtccctcagagtcaaaatcttcaacattcaagtcaaagaggtcacggtgcaggactccaccaccaccatcgccaacaacctcacctccaccgtccaagtgtttacggacgacgactaccagctgccctacgtcgtcggcaacgggaccgagggatgcctgccggccttccctccgcaggtctttacgctgccgcagtacggttacgcgacgctgaaccgcgacaacacagaaaatcccaccgagaggagcagcttcttctgcctagagtactttcccagcaagatgctgagaacgggcaacaactttgagtttacctacaactttgaggaggtgcccttccactccagcttcgctcccagtcagaacctgttcaagctggccaacccgctggtggaccagtacttgtaccgcttcgtgagcacaaataacactggcggagtccagttcaacaagaacctggccgggagatacgccaacacctacaaaaactggttcccggggcccatgggccgaacccagggctggaacctgggctccggggtcaaccgcgccagtgtcagcgccttcgccacgaccaataggatggagctcgagggcgcgagttaccaggtgcccccgcagccgaacggcatgaccaacaacctccagggcagcaacacctatgccctggagaacactatgatcttcaacagccagccggcgaacccgggcaccaccgccacgtacctcgagggcaacatgctcatcaccagcgagagcgagacgcagccggtgaaccgcgtggcgtacaacgtcggcgggcagatggccaccaacaaccagagctccaccactgcccccgcgaccggcacgtacaacctccaggaaatcgtgcccggcagcgtgtggatggagagggacgtgtacctccaaggacccatctgggccaagatcccagagacgggggcgcactttcacccctctccggccatgggcggattcggactcaaacacccaccgcccatgatgctcatcaagaacacgcctgtgcccggaaatatcaccagcttctcggacgtgcccgtcagcagcttcatcacccagtacagcaccgggcaggtcaccgtggagatggagtgggagctcaagaaggaaaactccaagaggtggaacccagagatccagtacacaaacaactacaacgacccccagtttgtggactttgccccggacagcaccggggaatacagaaccaccagacctatcggaacccgataccttacccgacccctt

SEQ ID NO: 92 - protein, 720 aa, Adeno-associated virus
MSFVDHPPDWLEEVGEGLREFLGLEAGPPKPKPNQQHQDQARGLVLPGYNYLGPGNGLDRGEPVNRADEVAREHDISYNEQLEAGDNPYLKYNHADAEFQEKLADDTSFGGNLGKAVFQAKKRVLEPFGLVEEGAKTAPTGKRIDDHFPKRKKARTEEDSKPSTSSDAEAGPSGSQQLQIPAQPASSLGADTMSAGGGGPLGDNNQGADGVGNASGDWHCDSTWMGDRVVTKSTRTWVLPSYNNHQYREIKSGSVDGSNANAYFGYSTPWGYFDFNRFHSHWSPRDWQRLINNYWGFRPRSLRVKIFNIQVKEVTVQDSTTTIANNLTSTVQVFTDDDYQLPYVVGNGTEGCLPAFPPQVFTLPQYGYATLNRDNTENPTERSSFFCLEYFPSKMLRTGNNFEFTYNFEEVPFHSSFAPSQNLFKLANPLVDQYLYRFVSTNNTGGVQFNKNLAGRYANTYKNWFPGPMGRTQGWNLGSGVNRASVSAFATTNRMELEGASYQVPPQPNGMTNNLQGSNTYALENTMIFNSQPANPGTTATYLEGNMLITSESETQPVNRVAYNVGGQMATNNQSSTTAPATGTYNLQEIVPGSVWMERDVYLQGPIWAKIPETGAHFHPSPAMGGFGLKHPPPMMLIKNTPVPGNITSFSDVPVSSFITQYSTGQVTVEMEWELKKENSKRWNPEIQYTNNYNDPQFVDFAPDSTGEYRTTRPIGTRYL

SEQ ID NO: 93 - protein, 724 aa, Adeno-associated virus 5
MSFVDHPPDWLEEVGEGLREFLGLEAGPPKPKPNQQHQDQARGLVLPGYNYLGPGNGLDRGEPVNRADEVAREHDISYNEQLEAGDNPYLKYNHADAEFQEKLADDTSFGGNLGKAVFQAKKRVLEPFGLVEEGAKTAPTGKRIDDHFPKRKKARTEEDSKPSTSSDAEAGPSGSQQLQIPAQPASSLGADTMSAGGGGPLGDNNQGADGVGNASGDWHCDSTWMGDRVVTKSTRTWVLPSYNNHQYREIKSGSVDGSNANAYFGYSTPWGYFDFNRFHSHWSPRDWQRLINNYWGFRPRSLRVKIFNIQVKEVTVQDSTTTIANNLTSTVQVFTDDDYQLPYVVGNGTEGCLPAFPPQVFTLPQYGYATLNRDNTENPTERSSFFCLEYFPSKMLRTGNNFEFTYNFEEVPFHSSFAPSQNLFKLANPLVDQYLYRFVSTNNTGGVQFNKNLAGRYANTYKNWFPGPMGRTQGWNLGSGVNRASVSAFATTNRMELEGASYQVPPQPNGMTNNLQGSNTYALENTMIFNSQPANPGTTATYLEGNMLITSESETQPVNRVAYNVGGQMATNNQSSTTAPATGTYNLQEIVPGSVWMERDVYLQGPIWAKIPETGAHFHPSPAMGGFGLKHPPPMMLIKNTPVPGNITSFSDVPVSSFITQYSTGQVTVEMEWELKKENSKRWNPEIQYTNNYNDPQFVDFAPDSTGEYRTTRPIGTRYLTRPL

SEQ ID NO: 94 - protein, 2175 aa, Adeno-associated virus 5
ATGTCTTTTGTTGATCACCCTCCAGATTGGTTGGAAGAAGTTGGTGAAGGTCTTCGCGAGTTTTTGGGCCTTGAAGCGGGCCCACCGAAACCAAAACCCAATCAGCAGCATCAAGATCAAGCCCGTGGTCTTGTGCTGCCTGGTTATAACTATCTCGGACCCGGAAACGGTCTCGATCGAGGAGAGCCTGTCAACAGGGCAGACGAGGTCGCGCGAGAGCACGACATCTCGTACAACGAGCAGCTTGAGGCGGGAGACAACCCCTACCTCAAGTACAACCACGCGGACGCCGAGTTTCAGGAGAAGCTCGCCGACGACACATCCTTCGGGGGAAACCTCGGAAAGGCAGTCTTTCAGGCCAAGAAAAGGGTTCTCGAACCTTTTGGCCTGGTTGAAGAGGGTGCTAAGACGGCCCCTACCGGAAAGCGGATAGACGACCACTTTCCAAAAAGAAAGAAGGCTCGGACCGAAGAGGACTCCAAGCCTTCCACCTCGTCAGACGCCGAAGCTGGACCCAGCGGATCCCAGCAGCTGCAAATCCCAGCCCAACCAGCCTCAAGTTTGGGAGCTGATACAATGTCTGCGGGAGGTGGCGGCCCATTGGGCGACAATAACCAAGGTGCCGATGGAGTGGGCAATGCCTCGGGAGATTGGCATTGCGATTCCACGTGGATGGGGGACAGAGTCGTCACCAAGTCCACCCGAACCTGGGTGCTGCCCAGCTACAACAACCACCAGTACCGAGAGATCAAAAGCGGCTCCGTCGACGGAAGCAACGCCAACGCCTACTTTGGATACAGCACCCCCTGGGGGTACTTTGACTTTAACCGCTTCCACAGCCACTGGAGCCCCCGAGACTGGCAAAGACTCATCAACAACTACTGGGGCTTCAGACCCCGGTCCCTCAGAGTCAAAATCTTCAACATTCAAGTCAAAGAGGTCACGGTGCAGGACTCCACCACCACCATCGCCAACAACCTCACCTCCACCGTCCAAGTGTTTACGGACGACGACTACCAGCTGCCCTACGTCGTCGGCAACGGGACCGAGGGATGCCTGCCGGCCTTCCCTCCGCAGGTCTTTACGCTGCCGCAGTACGGTTACGCGACGCTGAACCGCGACAACACAGAAAATCCCACCGAGAGGAGCAGCTTCTTCTGCCTAGAGTACTTTCCCAGCAAGATGCTGAGAACGGGCAACAACTTTGAGTTTACCTACAACTTTGAGGAGGTGCCCTTCCACTCCAGCTTCGCTCCCAGTCAGAACCTGTTCAAGCTGGCCAACCCGCTGGTGGACCAGTACTTGTACCGCTTCGTGAGCACAAATAACACTGGCGGAGTCCAGTTCAACAAGAACCTGGCCGGGAGATACGCCAACACCTACAAAAACTGGTTCCCGGGGCCCATGGGCCGAACCCAGGGCTGGAACCTGGGCTCCGGGGTCAACCGCGCCAGTGTCAGCGCCTTCGCCACGACCAATAGGATGGAGCTCGAGGGCGCGAGTTACCAGGTGCCCCCGCAGCCGAACGGCATGACCAACAACCTCCAGGGCAGCAACACCTATGCCCTGGAGAACACTATGATCTTCAACAGCCAGCCGGCGAACCCGGGCACCACCGCCACGTACCTCGAGGGCAACATGCTCATCACCAGCGAGAGCGAGACGCAGCCGGTGAACCGCGTGGCGTACAACGTCGGCGGGCAGATGGCCACCAACAACCAGAGCTCCACCACTGCCCCCGCGACCGGCACGTACAACCTCCAGGAAATCGTGCCCGGCAGCGTGTGGATGGAGAGGGACGTGTACCTCCAAGGACCCATCTGGGCCAAGATCCCAGAGACGGGGGCGCACTTTCACCCCTCTCCGGCCATGGGCGGATTCGGACTCAAACACCCACCGCCCATGATGCTCATCAAGAACACGCCTGTGCCCGGAAATATCACCAGCTTCTCGGACGTGCCCGTCAGCAGCTTCATCACCCAGTACAGCACCGGGCAGGTCACCGTGGAGATGGAGTGGGAGCTCAAGAAGGAAAACTCCAAGAGGTGGAACCCAGAGATCCAGTACACAAACAACTACAACGACCCCCAGTTTGTGGACTTTGCCCCGGACAGCACCGGGGAATACAGAACCACCAGACCTATCGGAACCCGATACCTTACCCGACCCCTTTAA

SEQ ID NO: 95 - DNA, 2208 bp, Adeno-associated virus 6
atggctgccgatggttatcttccagattggctcgaggacaacctctctgagggcattcgcgagtggtgggacttgaaacctggagccccgaaacccaaagccaaccagcaaaagcaggacgacggccggggtctggtgcttcctggctacaagtacctcggacccttcaacggactcgacaagggggagcccgtcaacgcggcggatgcagcggccctcgagcacgacaaggcctacgaccagcagctcaaagcgggtgacaatccgtacctgcggtataaccacgccgacgccgagtttcaggagcgtctgcaagaagatacgtcttttgggggcaacctcgggcgagcagtcttccaggccaagaagagggttctcgaaccttttggtctggttgaggaaggtgctaagacggctcctggaaagaaacgtccggtagagcagtcgccacaagagccagactcctcctcgggcattggcaagacaggccagcagcccgctaaaaagagactcaattttggtcagactggcgactcagagtcagtccccgacccacaacctctcggagaacctccagcaacccccgctgctgtgggacctactacaatggcttcaggcggtggcgcaccaatggcagacaataacgaaggcgccgacggagtgggtaatgcctcaggaaattggcattgcgattccacatggctgggcgacagagtcatcaccaccagcacccgaacatgggccttgcccacctataacaaccacctctacaagcaaatctccagtgcttcaacgggggccagcaacgacaaccactacttcggctacagcaccccctgggggtattttgatttcaacagattccactgccatttctcaccacgtgactggcagcgactcatcaacaacaattggggattccggcccaagagactcaacttcaagctcttcaacatccaagtcaaggaggtcacgacgaatgatggcgtcacgaccatcgctaataaccttaccagcacggttcaagtcttctcggactcggagtaccagttgccgtacgtcctcggctctgcgcaccagggctgcctccctccgttcccggcggacgtgttcatgattccgcagtacggctacctaacgctcaacaatggcagccaggcagtgggacggtcatccttttactgcctggaatatttcccatcgcagatgctgagaacgggcaataactttaccttcagctacaccttcgaggacgtgcctttccacagcagctacgcgcacagccagagcctggaccggctgatgaatcctctcatcgaccagtacctgtattacctgaacagaactcagaatcagtccggaagtgcccaaaacaaggacttgctgtttagccgggggtctccagctggcatgtctgttcagcccaaaaactggctacctggaccctgttaccggcagcagcgcgtttctaaaacaaaaacagacaacaacaacagcaactttacctggactggtgcttcaaaatataaccttaatgggcgtgaatctataatcaaccctggcactgctatggcctcacacaaagacgacaaagacaagttctttcccatgagcggtgtcatgatttttggaaaggagagcgccggagcttcaaacactgcattggacaatgtcatgatcacagacgaagaggaaatcaaagccactaaccccgtggccaccgaaagatttgggactgtggcagtcaatctccagagcagcagcacagaccctgcgaccggagatgtgcatgttatgggagccttacctggaatggtgtggcaagacagagacgtatacctgcagggtcctatttgggccaaaattcctcacacggatggacactttcacccgtctcctctcatgggcggctttggacttaagcacccgcctcctcagatcctcatcaaaaacacgcctgttcctgcgaatcctccggcagagttttcggctacaaagtttgcttcattcatcacccagtattccacaggacaagtgagcgtggagattgaatgggagctgcagaaagaaaacagcaaacgctggaatcccgaagtgcagtatacatctaactatgcaaaatctgccaacgttgatttcactgtggacaacaatggactttatactgagcctcgccccattggcacccgttacctcacccgtcccctg

SEQ ID NO: 96 - protein, 736 aa, Adeno-associated virus 6
MAADGYLPDWLEDNLSEGIREWWDLKPGAPKPKANQQKQDDGRGLVLPGYKYLGPFNGLDKGEPVNAADAAALEHDKAYDQQLKAGDNPYLRYNHADAEFQERLQEDTSFGGNLGRAVFQAKKRVLEPFGLVEEGAKTAPGKKRPVEQSPQEPDSSSGIGKTGQQPAKKRLNFGQTGDSESVPDPQPLGEPPATPAAVGPTTMASGGGAPMADNNEGADGVGNASGNWHCDSTWLGDRVITTSTRTWALPTYNNHLYKQISSASTGASNDNHYFGYSTPWGYFDFNRFHCHFSPRDWQRLINNNWGFRPKRLNFKLFNIQVKEVTTNDGVTTIANNLTSTVQVFSDSEYQLPYVLGSAHQGCLPPFPADVFMIPQYGYLTLNNGSQAVGRSSFYCLEYFPSQMLRTGNNFTFSYTFEDVPFHSSYAHSQSLDRLMNPLIDQYLYYLNRTQNQSGSAQNKDLLFSRGSPAGMSVQPKNWLPGPCYRQQRVSKTKTDNNNSNFTWTGASKYNLNGRESIINPGTAMASHKDDKDKFFPMSGVMIFGKESAGASNTALDNVMITDEEEIKATNPVATERFGTVAVNLQSSSTDPATGDVHVMGALPGMVWQDRDVYLQGPIWAKIPHTDGHFHPSPLMGGFGLKHPPPQILIKNTPVPANPPAEFSATKFASFITQYSTGQVSVEIEWELQKENSKRWNPEVQYTSNYAKSANVDFTVDNNGLYTEPRPIGTRYLTRPL

SEQ ID NO: 97 - protein, 623 aa, Adeno-associated virus 6
MPGFYEIVIKVPSDLDEHLPGISDSFVNWVAEKEWELPPDSDMDLNLIEQAPLTVAEKLQRDFLVQWRRVSKAPEALFFVQFEKGESYFHLHILVETTGVKSMVLGRFLSQIRDKLVQTIYRGIEPTLPNWFAVTKTRNGAGGGNKVVDECYIPNYLLPKTQPELQWAWTNMEEYISACLNLAERKRLVAHDLTHVSQTQEQNKENLNPNSDAPVIRSKTSARYMELVGWLVDRGITSEKQWIQEDQASYISFNAASNSRSQIKAALDNAGKIMALTKSAPDYLVGPAPPADIKTNRIYRILELNGYDPAYAGSVFLGWAQKRFGKRNTIWLFGPATTGKTNIAEAIAHAVPFYGCVNWTNENFPFNDCVDKMVIWWEEGKMTAKVVESAKAILGGSKVRVDQKCKSSAQIDPTPVIVTSNTNMCAVIDGNSTTFEHQQPLQDRMFKFELTRRLEHDFGKVTKQEVKEFFRWAQDHVTEVAHEFYVRKGGANKRPAPDDADKSEPKRACPSVADPSTSDAEGAPVDFADRYQNKCSRHAGMLQMLFPCKTCERMNQNFNICFTHGTRDCSECFPGVSESQPVVRKRTYRKLCAIHHLLGRAPEIACSACDLVNVDLDDCVSEQ

SEQ ID NO: 98 - DNA, 4683 bp, Adeno-associated virus 6
ttggccactccctctctgcgcgctcgctcgctcactgaggccgggcgaccaaaggtcgcccgacgcccgggctttgcccgggcggcctcagtgagcgagcgagcgcgcagagagggagtggccaactccatcactaggggttcctggaggggtggagtcgtgacgtgaattacgtcatagggttagggaggtcctgtattagaggtcacgtgagtgttttgcgacattttgcgacaccatgtggtcacgctgggtatttaagcccgagtgagcacgcagggtctccattttgaagcgggaggtttgaacgcgcagcgccatgccggggttttacgagattgtgattaaggtccccagcgaccttgacgagcatctgcccggcatttctgacagctttgtgaactgggtggccgagaaggaatgggagttgccgccagattctgacatggatctgaatctgattgagcaggcacccctgaccgtggccgagaagctgcagcgcgacttcctggtccagtggcgccgcgtgagtaaggccccggaggccctcttctttgttcagttcgagaagggcgagtcctacttccacctccatattctggtggagaccacgggggtcaaatccatggtgctgggccgcttcctgagtcagattagggacaagctggtgcagaccatctaccgcgggatcgagccgaccctgcccaactggttcgcggtgaccaagacgcgtaatggcgccggaggggggaacaaggtggtggacgagtgctacatccccaactacctcctgcccaagactcagcccgagctgcagtgggcgtggactaacatggaggagtatataagcgcgtgtttaaacctggccgagcgcaaacggctcgtggcgcacgacctgacccacgtcagccagacccaggagcagaacaaggagaatctgaaccccaattctgacgcgcctgtcatccggtcaaaaacctccgcacgctacatggagctggtcgggtggctggtggaccggggcatcacctccgagaagcagtggatccaggaggaccaggcctcgtacatctccttcaacgccgcctccaactcgcggtcccagatcaaggccgctctggacaatgccggcaagatcatggcgctgaccaaatccgcgcccgactacctggtaggccccgctccgcccgccgacattaaaaccaaccgcatttaccgcatcctggagctgaacggctacgaccctgcctacgccggctccgtctttctcggctgggcccagaaaaggttcggaaaacgcaacaccatctggctgtttgggccggccaccacgggcaagaccaacatcgcggaagccatcgcccacgccgtgcccttctacggctgcgtcaactggaccaatgagaactttcccttcaacgattgcgtcgacaagatggtgatctggtgggaggagggcaagatgacggccaaggtcgtggagtccgccaaggccattctcggcggcagcaaggtgcgcgtggaccaaaagtgcaagtcgtccgcccagatcgatcccacccccgtgatcgtcacctccaacaccaacatgtgcgccgtgattgacgggaacagcaccaccttcgagcaccagcagccgttgcaggaccggatgttcaaatttgaactcacccgccgtctggagcatgactttggcaaggtgacaaagcaggaagtcaaagagttcttccgctgggcgcaggatcacgtgaccgaggtggcgcatgagttctacgtcagaaagggtggagccaacaagagacccgcccccgatgacgcggataaaagcgagcccaagcgggcctgcccctcagtcgcggatccatcgacgtcagacgcggaaggagctccggtggactttgccgacaggtaccaaaacaaatgttctcgtcacgcgggcatgcttcagatgctgtttccctgcaaaacatgcgagagaatgaatcagaatttcaacatttgcttcacgcacgggaccagagactgttcagaatgtttccccggcgtgtcagaatctcaaccggtcgtcagaaagaggacgtatcggaaactctgtgccattcatcatctgctggggcgggctcccgagattgcttgctcggcctgcgatctggtcaacgtggatctggatgactgtgtttctgagcaataaatgacttaaaccaggtatggctgccgatggttatcttccagattggctcgaggacaacctctctgagggcattcgcgagtggtgggacttgaaacctggagccccgaaacccaaagccaaccagcaaaagcaggacgacggccggggtctggtgcttcctggctacaagtacctcggacccttcaacggactcgacaagggggagcccgtcaacgcggcggatgcagcggccctcgagcacgacaaggcctacgaccagcagctcaaagcgggtgacaatccgtacctgcggtataaccacgccgacgccgagtttcaggagcgtctgcaagaagatacgtcttttgggggcaacctcgggcgagcagtcttccaggccaagaagagggttctcgaaccttttggtctggttgaggaaggtgctaagacggctcctggaaagaaacgtccggtagagcagtcgccacaagagccagactcctcctcgggcattggcaagacaggccagcagcccgctaaaaagagactcaattttggtcagactggcgactcagagtcagtccccgacccacaacctctcggagaacctccagcaacccccgctgctgtgggacctactacaatggcttcaggcggtggcgcaccaatggcagacaataacgaaggcgccgacggagtgggtaatgcctcaggaaattggcattgcgattccacatggctgggcgacagagtcatcaccaccagcacccgaacatgggccttgcccacctataacaaccacctctacaagcaaatctccagtgcttcaacgggggccagcaacgacaaccactacttcggctacagcaccccctgggggtattttgatttcaacagattccactgccatttctcaccacgtgactggcagcgactcatcaacaacaattggggattccggcccaagagactcaacttcaagctcttcaacatccaagtcaaggaggtcacgacgaatgatggcgtcacgaccatcgctaataaccttaccagcacggttcaagtcttctcggactcggagtaccagttgccgtacgtcctcggctctgcgcaccagggctgcctccctccgttcccggcggacgtgttcatgattccgcagtacggctacctaacgctcaacaatggcagccaggcagtgggacggtcatccttttactgcctggaatatttcccatcgcagatgctgagaacgggcaataactttaccttcagctacaccttcgaggacgtgcctttccacagcagctacgcgcacagccagagcctggaccggctgatgaatcctctcatcgaccagtacctgtattacctgaacagaactcagaatcagtccggaagtgcccaaaacaaggacttgctgtttagccgggggtctccagctggcatgtctgttcagcccaaaaactggctacctggaccctgttaccggcagcagcgcgtttctaaaacaaaaacagacaacaacaacagcaactttacctggactggtgcttcaaaatataaccttaatgggcgtgaatctataatcaaccctggcactgctatggcctcacacaaagacgacaaagacaagttctttcccatgagcggtgtcatgatttttggaaaggagagcgccggagcttcaaacactgcattggacaatgtcatgatcacagacgaagaggaaatcaaagccactaaccccgtggccaccgaaagatttgggactgtggcagtcaatctccagagcagcagcacagaccctgcgaccggagatgtgcatgttatgggagccttacctggaatggtgtggcaagacagagacgtatacctgcagggtcctatttgggccaaaattcctcacacggatggacactttcacccgtctcctctcatgggcggctttggacttaagcacccgcctcctcagatcctcatcaaaaacacgcctgttcctgcgaatcctccggcagagttttcggctacaaagtttgcttcattcatcacccagtattccacaggacaagtgagcgtggagattgaatgggagctgcagaaagaaaacagcaaacgctggaatcccgaagtgcagtatacatctaactatgcaaaatctgccaacgttgatttcactgtggacaacaatggactttatactgagcctcgccccattggcacccgttacctcacccgtcccctgtaattgtgtgttaatcaataaaccggttaattcgtgtcagttgaactttggtctcatgtcgttattatcttatctggtcaccatagcaaccggttacacattaactgcttagttgcgcttcgcgaatacccctagtgatggagttgcccactccctctatgcgcgctcgctcgctcggtggggccggcagagcagagctctgccgtctgcggacctttggtccgcaggccccaccgagcgagcgagcgcgcatagagggagtgggcaa

SEQ ID NO: 99 - DNA, 2211 bp, Adeno-associated virus 6
atggctgccgatggttatcttccagattggctcgaggacaacctctctgagggcattcgcgagtggtgggacttgaaacctggagccccgaaacccaaagccaaccagcaaaagcaggacgacggccggggtctggtgcttcctggctacaagtacctcggacccttcaacggactcgacaagggggagcccgtcaacgcggcggatgcagcggccctcgagcacgacaaggcctacgaccagcagctcaaagcgggtgacaatccgtacctgcggtataaccacgccgacgccgagtttcaggagcgtctgcaagaagatacgtcttttgggggcaacctcgggcgagcagtcttccaggccaagaagagggttctcgaaccttttggtctggttgaggaaggtgctaagacggctcctggaaagaaacgtccggtagagcagtcgccacaagagccagactcctcctcgggcattggcaagacaggccagcagcccgctaaaaagagactcaattttggtcagactggcgactcagagtcagtccccgacccacaacctctcggagaacctccagcaacccccgctgctgtgggacctactacaatggcttcaggcggtggcgcaccaatggcagacaataacgaaggcgccgacggagtgggtaatgcctcaggaaattggcattgcgattccacatggctgggcgacagagtcatcaccaccagcacccgaacatgggccttgcccacctataacaaccacctctacaagcaaatctccagtgcttcaacgggggccagcaacgacaaccactacttcggctacagcaccccctgggggtattttgatttcaacagattccactgccatttctcaccacgtgactggcagcgactcatcaacaacaattggggattccggcccaagagactcaacttcaagctcttcaacatccaagtcaaggaggtcacgacgaatgatggcgtcacgaccatcgctaataaccttaccagcacggttcaagtcttctcggactcggagtaccagttgccgtacgtcctcggctctgcgcaccagggctgcctccctccgttcccggcggacgtgttcatgattccgcagtacggctacctaacgctcaacaatggcagccaggcagtgggacggtcatccttttactgcctggaatatttcccatcgcagatgctgagaacgggcaataactttaccttcagctacaccttcgaggacgtgcctttccacagcagctacgcgcacagccagagcctggaccggctgatgaatcctctcatcgaccagtacctgtattacctgaacagaactcagaatcagtccggaagtgcccaaaacaaggacttgctgtttagccgggggtctccagctggcatgtctgttcagcccaaaaactggctacctggaccctgttaccggcagcagcgcgtttctaaaacaaaaacagacaacaacaacagcaactttacctggactggtgcttcaaaatataaccttaatgggcgtgaatctataatcaaccctggcactgctatggcctcacacaaagacgacaaagacaagttctttcccatgagcggtgtcatgatttttggaaaggagagcgccggagcttcaaacactgcattggacaatgtcatgatcacagacgaagaggaaatcaaagccactaaccccgtggccaccgaaagatttgggactgtggcagtcaatctccagagcagcagcacagaccctgcgaccggagatgtgcatgttatgggagccttacctggaatggtgtggcaagacagagacgtatacctgcagggtcctatttgggccaaaattcctcacacggatggacactttcacccgtctcctctcatgggcggctttggacttaagcacccgcctcctcagatcctcatcaaaaacacgcctgttcctgcgaatcctccggcagagttttcggctacaaagtttgcttcattcatcacccagtattccacaggacaagtgagcgtggagattgaatgggagctgcagaaagaaaacagcaaacgctggaatcccgaagtgcagtatacatctaactatgcaaaatctgccaacgttgatttcactgtggacaacaatggactttatactgagcctcgccccattggcacccgttacctcacccgtcccctgtaa

SEQ ID NO: 100 - protein, 736 aa, Adeno-associated virus; identical to SEQ ID NO: 96

SEQ ID NO: 101 - protein, 736 aa, Adeno-associated virus
MAADGYLPDWLEDNLSEGIREWWDLKPGAPKPKANQQKQDDGRGLVLPGYKYLGPFNGLDKGEPVNAADAAALEHDKAYDQQLKAGDNPYLRYNHADAEFQERLQEDTSFGGNLGRAVFQAKKRVLEPFGLVEEGAKTAPGKKRPVEQSPQEPDSSSGIGKTGQQPAKKRLNFGQTGDSESVPDPQPLGEPPATPAAVGPTTMASGGGAPMADNNEGADGVGNASGNWHCDSTWLGDRVITTSTRTWALPTYNNHLYKQISSASTGASNDNHYFGYSTPWGYFDFNRFHCHFSPRDWQRLINNNWGFRPKRLNFKLFNIQVKEVTTNDGVTTIANNLTSTVQVFSDSEYQLPYVLGSAHQGCLPPFPADVFMIPQYGYLTLNNGSQAVGRSSFYCLEYFPSQMLRTGNNFTFSYTFEDVPFHSSYAHSQSLDRLMNPLIDQYLYYLNRTQNQSGSAQNKDLLFSRGSPAGMSVQPKNWLPGPCYRQQRVSKTKTDNNNSNFTWTGASKYNLNGRESIINPGTAMASHKDDEDKFFPMSGVMIFGKESAGASNTALDNVMITDEEEIKATNPVATERFGTVAVNLQSSSTDPATGDVHVMGALPGMVWQDRDVYLQGPIWAKIPHTDGHFHPSPLMGGFGLKHPPPQILIKNTPVPANPPAEFSATKFASFITQYSTGQVSVEIEWELQKENSKRWNPEVQYTSNYAKSANVDFTVDNNGLYTEPRPIGTRYLTRPL

SEQ ID NO: 102 - protein, 736 aa, Adeno-associated virus
MAADGYLPDWLEDNLSEGIREWWDLKPGAPKPKANQQKQDDGRGLVLPGYKYLGPFNGLDKGEPVNAADAAALEHDKAYDQQLKAGDNPYLRYNHADAEFQERLQEDTSFGGNLGRAVFQAKKRVLEPLGLVEEGAKTAPGKKRPVEQSPQEPDSSSGIGKTGQQPAKKRLNFGQTGDSESVPDPQPLGEPPATPAAVGPTTMASGGGAPMADNNEGADGVGNASGNWHCDSTWLGDRVITTSTRTWALPTYNNHLYKQISSASTGASNDNHYFGYSTPWGYFDFNRFHCHFSPRDWQRLINNNWGFRPKRLNFKLFNIQVKEVTTNDGVTTIANNLTSTVQVFSDSEYQLPYVLGSAHQGCLPPFPADVFMIPQYGYLTLNNGSQAVGRSSFYCLEYFPSQMLRTGNNFTFSYTFEDVPFHSSYAHSQSLDRLMNPLIDQYLYYLNRTQNQSGSAQNKDLLFSRGSPAGMSVQPKNWLPGPCYRQQRVSKTKTDNNNSNFTWTGASKYNLNGRESIINPGTAMASHKDDEDKFFPMSGVMIFGKESAGASNTALDNVMITDEEEIKATNPVATERFGTVAVNLQSSSTDPATGDVHVMGALPGMVWQDRDVYLQGPIWAKIPHTDGHFHPSPLMGGFGLKHPPPQILIKNTPVPANPPAEFSATKFASFITQYSTGQVSVEIEWELQKENSKRWNPEVQYTSNYAKSANVDFTVDNNGLYTEPRPIGTRYLTRPL

SEQ ID NO: 103 - protein, 736 aa, Adeno-associated virus
MAADGYLPDWLEDNLSEGIREWWDLKPGAPKPKANQQKQDDGRGLVLPGYKYLGPFNGLDKGEPVNAADAAALEHDKAYDQQLKAGDNPYLRYNHADAEFQERLQEDTSFGGNLGRAVFQAKKRVLEPLGLVEEGAKTAPGKKRPVEQSPQEPDSSSGIGKTGQQPAKKRLNFGQTGDSESVPDPQPLGEPPATPAAVGPTTMASGGGAPMADNNEGADGVGNASGNWHCDSTWLGDRVITTSTRTWALPTYNNHLYKQISSASTGASNDNHYFGYSTPWGYFDFNRFHCHFSPRDWQRLINNNWGFRPKRLNFKLFNIQVKEVTTNDGVTTIANNLTSTVQVFSDSEYQLPYVLGSAHQGCLPPFPADVFMIPQYGYLTLNNGSQAVGRSSFYCLEYFPSQMLRTGNNFTFSYTFEDVPFHSSYAHSQSLDRLMNPLIDQYLYYLNRTQNQSGSAQNKDLLFSRGSPAGMSVQPKNWLPGPCYRQQRVSKTKTDNNNSNFTWTGASKYNLNGRESIINPGTAMASHKDDKDKFFPMSGVMIFGKESAGASNTALDNVMITDEEEIKATNPVATERFGTVAVNLQSSSTDPATGDVHVMGALPGMVWQDRDVYLQGPIWAKIPHTDGHFHPSPLMGGFGLKHPPPQILIKNTPVPANPPAEFSATKFASFITQYSTGQVSVEIEWELQKENSKRWNPEVQYTSNYAKSANVDFTVDNNGLYTEPRPIGTRYLTRPL

SEQ ID NO: 104 - DNA, 2214 bp, Adeno-associated virus 7
atggctgccgatggttatcttccagattggctcgaggacaacctctctgagggcattcgcgagtggtgggacctgaaacctggagccccgaaacccaaagccaaccagcaaaagcaggacaacggccggggtctggtgcttcctggctacaagtacctcggacccttcaacggactcgacaagggggagcccgtcaacgcggcggacgcagcggccctcgagcacgacaaggcctacgaccagcagctcaaagcgggtgacaatccgtacctgcggtataaccacgccgacgccgagtttcaggagcgtctgcaagaagatacgtcatttgggggcaacctcgggcgagcagtcttccaggccaagaagcgggttctcgaacctctcggtctggttgaggaaggcgctaagacggctcctgcaaagaagagaccggtagagccgtcacctcagcgttcccccgactcctccacgggcatcggcaagaaaggccagcagcccgccagaaagagactcaatttcggtcagactggcgactcagagtcagtccccgaccctcaacctctcggagaacctccagcagcgccctctagtgtgggatctggtacagtggctgcaggcggtggcgcaccaatggcagacaataacgaaggtgccgacggagtgggtaatgcctcaggaaattggcattgcgattccacatggctgggcgacagagtcattaccaccagcacccgaacctgggccctgcccacctacaacaaccacctctacaagcaaatctccagtgaaactgcaggtagtaccaacgacaacacctacttcggctacagcaccccctgggggtattttgactttaacagattccactgccacttctcaccacgtgactggcagcgactcatcaacaacaactggggattccggcccaagaagctgcggttcaagctcttcaacatccaggtcaaggaggtcacgacgaatgacggcgttacgaccatcgctaataaccttaccagcacgattcaggtattctcggactcggaataccagctgccgtacgtcctcggctctgcgcaccagggctgcctgcctccgttcccggcggacgtcttcatgattcctcagtacggctacctgactctcaacaatggcagtcagtctgtgggacgttcctccttctactgcctggagtacttcccctctcagatgctgagaacgggcaacaactttgagttcagctacagcttcgaggacgtgcctttccacagcagctacgcacacagccagagcctggaccggctgatgaatcccctcatcgaccagtacttgtactacctggccagaacacagagtaacccaggaggcacagctggcaatcgggaactgcagttttaccagggcgggccttcaactatggccgaacaagccaagaattggttacctggaccttgcttccggcaacaaagagtctccaaaacgctggatcaaaacaacaacagcaactttgcttggactggtgccaccaaatatcacctgaacggcagaaactcgttggttaatcccggcgtcgccatggcaactcacaaggacgacgaggaccgctttttcccatccagcggagtcctgatttttggaaaaactggagcaactaacaaaactacattggaaaatgtgttaatgacaaatgaagaagaaattcgtcctactaatcctgtagccacggaagaatacgggatagtcagcagcaacttacaagcggctaatactgcagcccagacacaagttgtcaacaaccagggagccttacctggcatggtctggcagaaccgggacgtgtacctgcagggtcccatctgggccaagattcctcacacggatggcaactttcacccgtctcctttgatgggcggctttggacttaaacatccgcctcctcagatcctgatcaagaacactcccgttcccgctaatcctccggaggtgtttactcctgccaagtttgcttcgttcatcacacagtacagcaccggacaagtcagcgtggaaatcgagtgggagctgcagaaggaaaacagcaagcgctggaacccggagattcagtacacctccaactttgaaaagcagactggtgtggactttgccgttgacagccagggtgtttactctgagcctcgccctattggcactcgttacctcacccgtaatctgtaa

SEQ ID NO: 105 - protein, 738 aa, Adeno-associated virus 7
MAADGYLPDWLEDNLSEGIREWWALKPGAPKPKANQQKQDDGRGLVLPGYKYLGPFNGLDKGEPVNAADAAALEHDKAYDQQLQAGDNPYLRYNHADAEFQERLQEDTSFGGNLGRAVFQAKKRVLEPLGLVEEGAKTAPGKKRPVEPSPQRSPDSSTGIGKKGQQPARKRLNFGQTGDSESVPDPQPLGEPPAAPSGVGPNTMAAGGGAPMADNNEGADGVGSSSGNWHCDSTWLGDRVITTSTRTWALPTYNNHLYKQISNGTSGGATNDNTYFGYSTPWGYFDFNRFHCHFSPRDWQRLINNNWGFRPKRLSFKLFNIQVKEVTQNEGTKTIANNLTSTIQVFTDSEYQLPYVLGSAHQGCLPPFPADVFMIPQYGYLTLNNGSQAVGRSSFYCLEYFPSQMLRTGNNFQFTYTFEDVPFHSSYAHSQSLDRLMNPLIDQYLYYLSRTQTTGGTANTQTLGFSQGGPNTMANQAKNWLPGPCYRQQRVSTTTGQNNNSNFAWTAGTKYHLNGRNSLANPGIAMATHKDDEERFFPSNGILIFGKQNAARDNADYSDVMLTSEEEIKTTNPVATEEYGIVADNLQQQNTAPQIGTVNSQGALPGMVWQNRDVYLQGPIWAKIPHTDGNFHPSPLMGGFGLKHPPPQILIKNTPVPADPPTTFNQSKLNSFITQYSTGQVSVEIEWELQKENSKRWNPEIQYTSNYYKSTSVDFAVNTEGVYSEPRPIGTRYLTRNL

SEQ ID NO: 106 - protein, 737 aa, Adeno-associated virus 7
MAADGYLPDWLEDNLSEGIREWWDLKPGAPKPKANQQKQDNGRGLVLPGYKYLGPFNGLDKGEPVNAADAAALEHDKAYDQQLKAGDNPYLRYNHADAEFQERLQEDTSFGGNLGRAVFQAKKRVLEPLGLVEEGAKTAPAKKRPVEPSPQRSPDSSTGIGKKGQQPARKRLNFGQTGDSESVPDPQPLGEPPAAPSSVGSGTVAAGGGAPMADNNEGADGVGNASGNWHCDSTWLGDRVITTSTRTWALPTYNNHLYKQISSETAGSTNDNTYFGYSTPWGYFDFNRFHCHFSPRDWQRLINNNWGFRPKKLRFKLFNIQVKEVTTNDGVTTIANNLTSTIQVFSDSEYQLPYVLGSAHQGCLPPFPADVFMIPQYGYLTLNNGSQSVGRSSFYCLEYFPSQMLRTGNNFEFSYSFEDVPFHSSYAHSQSLDRLMNPLIDQYLYYLARTQSNPGGTAGNRELQFYQGGPSTMAEQAKNWLPGPCFRQQRVSKTLDQNNNSNFAWTGATKYHLNGRNSLVNPGVAMATHKDDEDRFFPSSGVLIFGKTGATNKTTLENVLMTNEEEIRPTNPVATEEYGIVSSNLQAANTAAQTQVVNNQGALPGMVWQNRDVYLQGPIWAKIPHTDGNFHPSPLMGGFGLKHPPPQILIKNTPVPANPPEVFTPAKFASFITQYSTGQVSVEIEWELQKENSKRWNPEIQYTSNFEKQTGVDFAVDSQGVYSEPRPIGTRYLTRNL

SEQ ID NO: 107 - protein, 623 aa, Adeno-associated virus 7
MPGFYEIVIKVPSDLDEHLPGISDSFVNWVAEKEWELPPDSDMDLNLIEQAPLTVAEKLQRDFLVQWRRVSKAPEALFFVQFEKGESYFHLHVLVETTGVKSMVLGRFLSQIREKLVQTIYRGVEPTLPNWFAVTKTRNGAGGGNKVVDECYIPNYLLPKTQPELQWAWTNMEEYISACLNLAERKRLVAQHLTHVSQTQEQNKENLNPNSDAPVIRSKTSARYMELVGWLVDRGITSEKQWIQEDQASYISFNAASNSRSQIKAALDNAGKIMALTKSAPDYLVGPSLPADIKTNRIYRILELNGYDPAYAGSVFLGWAQKKFGKRNTIWLFGPATTGKTNIAEAIAHAVPFYGCVNWTNENFPFNDCVDKMVIWWEEGKMTAKVVESAKAILGGSKVRVDQKCKSSAQIDPTPVIVTSNTNMCAVIDGNSTTFEHQQPLQDRMFKFELTRRLEHDFGKVTKQEVKEFFRWASDHVTEVAHEFYVRKGGASKRPAPDDADISEPKRACPSVADPSTSDAEGAPVDFADRYQNKCSRHAGMIQMLFPCKTCERMNQNFNICFTHGVRDCLECFPGVSESQPVVRKKTYRKLCAIHHLLGRAPEIACSACDLVNVDLDDCVSEQ

SEQ ID NO: 108 - DNA, 4721 bp, Adeno-associated virus 7
ttggccactccctctatgcgcgctcgctcgctcggtggggcctgcggaccaaaggtccgcagacggcagagctctgctctgccggccccaccgagcgagcgagcgcgcatagagggagtggccaactccatcactaggggtaccgcgaagcgcctcccacgctgccgcgtcagcgctgacgtaaatcacgtcataggggagtggtcctgtattagctgtcacgtgagtgcttttgcgacattttgcgacaccacgtggccatttgaggtatatatggccgagtgagcgagcaggatctccattttgaccgcgaaatttgaacgagcagcagccatgccgggtttctacgagatcgtgatcaaggtgccgagcgacctggacgagcacctgccgggcatttctgactcgtttgtgaactgggtggccgagaaggaatgggagctgcccccggattctgacatggatctgaatctgatcgagcaggcacccctgaccgtggccgagaagctgcagcgcgacttcctggtccaatggcgccgcgtgagtaaggccccggaggccctgttctttgttcagttcgagaagggcgagagctacttccaccttcacgttctggtggagaccacgggggtcaagtccatggtgctaggccgcttcctgagtcagattcgggagaagctggtccagaccatctaccgcggggtcgagcccacgctgcccaactggttcgcggtgaccaagacgcgtaatggcgccggcggggggaacaaggtggtggacgagtgctacatccccaactacctcctgcccaagacccagcccgagctgcagtgggcgtggactaacatggaggagtatataagcgcgtgtttgaacctggccgaacgcaaacggctcgtggcgcagcacctgacccacgtcagccagacgcaggagcagaacaaggagaatctgaaccccaattctgacgcgcccgtgatcaggtcaaaaacctccgcgcgctacatggagctggtcgggtggctggtggaccggggcatcacctccgagaagcagtggatccaggaggaccaggcctcgtacatctccttcaacgccgcctccaactcgcggtcccagatcaaggccgcgctggacaatgccggcaagatcatggcgctgaccaaatccgcgcccgactacctggtggggccctcgctgcccgcggacattaaaaccaaccgcatctaccgcatcctggagctgaacgggtacgatcctgcctacgccggctccgtctttctcggctgggcccagaaaaagttcgggaagcgcaacaccatctggctgtttgggcccgccaccaccggcaagaccaacattgcggaagccatcgcccacgccgtgcccttctacggctgcgtcaactggaccaatgagaactttcccttcaacgattgcgtcgacaagatggtgatctggtgggaggagggcaagatgacggccaaggtcgtggagtccgccaaggccattctcggcggcagcaaggtgcgcgtggaccaaaagtgcaagtcgtccgcccagatcgaccccacccccgtgatcgtcacctccaacaccaacatgtgcgccgtgattgacgggaacagcaccaccttcgagcaccagcagccgttgcaggaccggatgttcaaatttgaactcacccgccgtctggagcacgactttggcaaggtgacgaagcaggaagtcaaagagttcttccgctgggccagtgatcacgtgaccgaggtggcgcatgagttctacgtcagaaagggcggagccagcaaaagacccgcccccgatgacgcggatataagcgagcccaagcgggcctgcccctcagtcgcggatccatcgacgtcagacgcggaaggagctccggtggactttgccgacaggtaccaaaacaaatgttctcgtcacgcgggcatgattcagatgctgtttccctgcaaaacgtgcgagagaatgaatcagaatttcaacatttgcttcacacacggggtcagagactgtttagagtgtttccccggcgtgtcagaatctcaaccggtcgtcagaaaaaagacgtatcggaaactctgcgcgattcatcatctgctggggcgggcgcccgagattgcttgctcggcctgcgacctggtcaacgtggacctggacgactgcgtttctgagcaataaatgacttaaaccaggtatggctgccgatggttatcttccagattggctcgaggacaacctctctgagggcattcgcgagtggtgggacctgaaacctggagccccgaaacccaaagccaaccagcaaaagcaggacaacggccggggtctggtgcttcctggctacaagtacctcggacccttcaacggactcgacaagggggagcccgtcaacgcggcggacgcagcggccctcgagcacgacaaggcctacgaccagcagctcaaagcgggtgacaatccgtacctgcggtataaccacgccgacgccgagtttcaggagcgtctgcaagaagatacgtcatttgggggcaacctcgggcgagcagtcttccaggccaagaagcgggttctcgaacctctcggtctggttgaggaaggcgctaagacggctcctgcaaagaagagaccggtagagccgtcacctcagcgttcccccgactcctccacgggcatcggcaagaaaggccagcagcccgccagaaagagactcaatttcggtcagactggcgactcagagtcagtccccgaccctcaacctctcggagaacctccagcagcgccctctagtgtgggatctggtacagtggctgcaggcggtggcgcaccaatggcagacaataacgaaggtgccgacggagtgggtaatgcctcaggaaattggcattgcgattccacatggctgggcgacagagtcattaccaccagcacccgaacctgggccctgcccacctacaacaaccacctctacaagcaaatctccagtgaaactgcaggtagtaccaacgacaacacctacttcggctacagcaccccctgggggtattttgactttaacagattccactgccacttctcaccacgtgactggcagcgactcatcaacaacaactggggattccggcccaagaagctgcggttcaagctcttcaacatccaggtcaaggaggtcacgacgaatgacggcgttacgaccatcgctaataaccttaccagcacgattcaggtattctcggactcggaataccagctgccgtacgtcctcggctctgcgcaccagggctgcctgcctccgttcccggcggacgtcttcatgattcctcagtacggctacctgactctcaacaatggcagtcagtctgtgggacgttcctccttctactgcctggagtacttcccctctcagatgctgagaacgggcaacaactttgagttcagctacagcttcgaggacgtgcctttccacagcagctacgcacacagccagagcctggaccggctgatgaatcccctcatcgaccagtacttgtactacctggccagaacacagagtaacccaggaggcacagctggcaatcgggaactgcagttttaccagggcgggccttcaactatggccgaacaagccaagaattggttacctggaccttgcttccggcaacaaagagtctccaaaacgctggatcaaaacaacaacagcaactttgcttggactggtgccaccaaatatcacctgaacggcagaaactcgttggttaatcccggcgtcgccatggcaactcacaaggacgacgaggaccgctttttcccatccagcggagtcctgatttttggaaaaactggagcaactaacaaaactacattggaaaatgtgttaatgacaaatgaagaagaaattcgtcctactaatcctgtagccacggaagaatacgggatagtcagcagcaacttacaagcggctaatactgcagcccagacacaagttgtcaacaaccagggagccttacctggcatggtctggcagaaccgggacgtgtacctgcagggtcccatctgggccaagattcctcacacggatggcaactttcacccgtctcctttgatgggcggctttggacttaaacatccgcctcctcagatcctgatcaagaacactcccgttcccgctaatcctccggaggtgtttactcctgccaagtttgcttcgttcatcacacagtacagcaccggacaagtcagcgtggaaatcgagtgggagctgcagaaggaaaacagcaagcgctggaacccggagattcagtacacctccaactttgaaaagcagactggtgtggactttgccgttgacagccagggtgtttactctgagcctcgccctattggcactcgttacctcacccgtaatctgtaattgcatgttaatcaataaaccggttgattcgtttcagttgaactttggtctcctgtgcttcttatcttatcggtttccatagcaactggttacacattaactgcttgggtgcgcttcacgataagaacactgacgtcaccgcggtacccctagtgatggagttggccactccctctatgcgcgctcgctcgctcggtggggcctgcggaccaaaggtccgcagacggcagagctctgctctgccggccccaccgagcgagcgagcgcgcatagagggagtggccaa

SEQ ID NO: 109 - DNA, 2214 bp, Adeno-associated virus 7; identical to SEQ ID NO: 104

SEQ ID NO: 110 - protein, 737 aa, Adeno-associated virus 7; identical to SEQ ID NO: 106

SEQ ID NO: 111 - DNA, 2217 bp, Adeno-associated virus 8
atggctgccgatggttatcttccagattggctcgaggacaacctctctgagggcattcgcgagtggtgggcgctgaaacctggagccccgaagcccaaagccaaccagcaaaagcaggacgacggccggggtctggtgcttcctggctacaagtacctcggacccttcaacggactcgacaagggggagcccgtcaacgcggcggacgcagcggccctcgagcacgacaaggcctacgaccagcagctgcaggcgggtgacaatccgtacctgcggtataaccacgccgacgccgagtttcaggagcgtctgcaagaagatacgtcttttgggggcaacctcgggcgagcagtcttccaggccaagaagcgggttctcgaacctctcggtctggttgaggaaggcgctaagacggctcctggaaagaagagaccggtagagccatcaccccagcgttctccagactcctctacgggcatcggcaagaaaggccaacagcccgccagaaaaagactcaattttggtcagactggcgactcagagtcagttccagaccctcaacctctcggagaacctccagcagcgccctctggtgtgggacctaatacaatggctgcaggcggtggcgcaccaatggcagacaataacgaaggcgccgacggagtgggtagttcctcgggaaattggcattgcgattccacatggctgggcgacagagtcatcaccaccagcacccgaacctgggccctgcccacctacaacaaccacctctacaagcaaatctccaacgggacatcgggaggagccaccaacgacaacacctacttcggctacagcaccccctgggggtattttgactttaacagattccactgccacttttcaccacgtgactggcagcgactcatcaacaacaactggggattccggcccaagagactcagcttcaagctcttcaacatccaggtcaaggaggtcacgcagaatgaaggcaccaagaccatcgccaataacctcaccagcaccatccaggtgtttacggactcggagtaccagctgccgtacgttctcggctctgcccaccagggctgcctgcctccgttcccggcggacgtgttcatgattccccagtacggctacctaacactcaacaacggtagtcaggccgtgggacgctcctccttctactgcctggaatactttccttcgcagatgctgagaaccggcaacaacttccagtttacttacaccttcgaggacgtgcctttccacagcagctacgcccacagccagagcttggaccggctgatgaatcctctgattgaccagtacctgtactacttgtctcggactcaaacaacaggaggcacggcaaatacgcagactctgggcttcagccaaggtgggcctaatacaatggccaatcaggcaaagaactggctgccaggaccctgttaccgccaacaacgcgtctcaacgacaaccgggcaaaacaacaatagcaactttgcctggactgctgggaccaaataccatctgaatggaagaaattcattggctaatcctggcatcgctatggcaacacacaaagacgacgaggagcgtttttttcccagtaacgggatcctgatttttggcaaacaaaatgctgccagagacaatgcggattacagcgatgtcatgctcaccagcgaggaagaaatcaaaaccactaaccctgtggctacagaggaatacggtatcgtggcagataacttgcagcagcaaaacacggctcctcaaattggaactgtcaacagccagggggccttacccggtatggtctggcagaaccgggacgtgtacctgcagggtcccatctgggccaagattcctcacacggacggcaacttccacccgtctccgctgatgggcggctttggcctgaaacatcctccgcctcagatcctgatcaagaacacgcctgtacctgcggatcctccgaccaccttcaaccagtcaaagctgaactctttcatcacgcaatacagcaccggacaggtcagcgtggaaattgaatgggagctgcagaaggaaaacagcaagcgctggaaccccgagatccagtacacctccaactactacaaatctacaagtgtggactttgctgttaatacagaaggcgtgtactctgaaccccgccccattggcacccgttacctcacccgtaatctgtaa

SEQ ID NO: 112 - DNA, 2213 bp, Adeno-associated virus 8
atggctgccgatggttatcttccagattggctcgaggacaacctctctgagggcattcgcgagtggtgggcgctgaaacctggagccccgaagcccaaagccaaccagcaaaagcaggacgacggccggggtctggtgcttcctggctacaagtacctcggacccttcaacggactcgacaagggggagcccgtcaacgcggcggacgcagcggccctcgagcacgacaaggcctacgaccagcagctgcaggcgggtgacaatccgtacctgcggtataaccacgccgacgccgagtttcaggagcgtctgcaagaagatacgtcttttgggggcaacctcgggcgagcagtcttccaggccaagaagcgggttctcgaacctctcggtctggttgaggaaggcgctaagacggctcctggaaagaagagaccggtagagccatcaccccagcgttctccagactcctctacgggcatcggcaagaaaggccaacagcccgccagaaaaagactcaattttggtcagactggcgactcagagtcagttccagaccctcaacctctcggagaacctccagcagcgccctctggtgtgggacctaatacaatggctgcaggcggtggcgcaccaatggcagacaataacgaaggcgccgacggagtgggtagttcctcgggaaattggcattgcgattccacatggctgggcgacagagtcatcaccaccagcacccgaacctgggccctgcccacctacaacaaccacctctacaagcaaatctccaacgggacatcgggaggagccaccaacgacaacacctacttcggctacagcaccccctgggggtattttgactttaacagattccactgccacttttcaccacgtgactggcagcgactcatcaacaacaactggggattccggcccaagagactcagcttcaagctcttcaacatccaggtcaaggaggtcacgcagaatgaaggcaccaagaccatcgccaataacctcaccagcaccatccaggtgtttacggactcggagtaccagctgccgtacgttctcggctctgcccaccagggctgcctgcctccgttcccggcggacgtgttcatgattccccagtacggctacctaacactcaacaacggtagtcaggccgtgggacgctcctccttctactgcctggaatactttccttcgcagatgctgagaaccggcaacaacttccagtttacttacaccttcgaggacgtgcctttccacagcagctacgcccacagccagagcttggaccggctgatgaatcctctgattgaccagtacctgtactacttgtctcggactcaaacaacaggaggcacggcaaatacgcagactctgggcttcagccaaggtgggcctaatacaatggccaatcaggcaaagaactggctgccaggaccctgttaccgccaacaacgcgtctcaacgacaaccgggcaaaacaacaatagcaactttgcctggactgctgggaccaaataccatctgaatggaagaaattcattggctaatcctggcatcgctatggcaacacacaaagacgacgaggagcgtttttttcccagtaacgggatcctgatttttggcaaacaaaatgctgccagagacaatgcggattacagcgatgtcatgctcaccagcgaggaagaaatcaaaaccactaaccctgtggctacagaggaatacggtatcgtggcagataacttgcagcagcaaaacacggctcctcaaattggaactgtcaacagccagggggccttacccggtatggtctggcagaaccgggacgtgtacctgcagggtcccatctgggccaagattcctcacacggacggcaacttccacccgtctccgctgatgggcggctttggcctgaaacatcctccgcctcagatcctgatcaagaacacgcctgtacctgcggatcctccgaccaccttcaaccagtcaaagctgaactctttcatcacgcaatacagcaccggacaggtcagcgtggaaattgaatgggagctgcagaaggaaaacagcaagcgctggaaccccgagatccagtacacctccaactactacaaatctacaagtgtggactttgctgtaatacagaaggcgtgtactctgaaccccgccccattggcacccgttacctcacccgtaatctg

SEQ ID NO: 113 - DNA, 4393 bp, Adeno-associated virus 8
cagagagggagtggccaactccatcactaggggtagcgcgaagcgcctcccacgctgccgcgtcagcgctgacgtaaattacgtcataggggagtggtcctgtattagctgtcacgtgagtgcttttgcggcattttgcgacaccacgtggccatttgaggtatatatggccgagtgagcgagcaggatctccattttgaccgcgaaatttgaacgagcagcagccatgccgggcttctacgagatcgtgatcaaggtgccgagcgacctggacgagcacctgccgggcatttctgactcgtttgtgaactgggtggccgagaaggaatgggagctgcccccggattctgacatggatcggaatctgatcgagcaggcacccctgaccgtggccgagaagctgcagcgcgacttcctggtccaatggcgccgcgtgagtaaggccccggaggccctcttctttgttcagttcgagaagggcgagagctactttcacctgcacgttctggtcgagaccacgggggtcaagtccatggtgctaggccgcttcctgagtcagattcgggaaaagcttggtccagaccatctacccgcggggtcgagccccaccttgcccaactggttcgcggtgaccaaagacgcggtaatggcgccggcgggggggaacaaggtggtggacgagtgctacatccccaactacctcctgcccaagactcagcccgagctgcagtgggcgtggactaacatggaggagtatataagcgcgtgcttgaacctggccgagcgcaaacggctcgtggcgcagcacctgacccacgtcagccagacgcaggagcagaacaaggagaatctgaaccccaattctgacgcgcccgtgatcaggtcaaaaacctccgcgcgctatatggagctggtcgggtggctggtggaccggggcatcacctccgagaagcagtggatccaggaggaccaggcctcgtacatctccttcaacgccgcctccaactcgcggtcccagatcaaggccgcgctggacaatgccggcaagatcatggcgctgaccaaatccgcgcccgactacctggtggggccctcgctgcccgcggacattacccagaaccgcatctaccgcatcctcgctctcaacggctacgaccctgcctacgccggctccgtctttctcggctgggctcagaaaaagttcgggaaacgcaacaccatctggctgtttggacccgccaccaccggcaagaccaacattgcggaagccatcgcccacgccgtgcccttctacggctgcgtcaactggaccaatgagaactttcccttcaatgattgcgtcgacaagatggtgatctggtgggaggagggcaagatgacggccaaggtcgtggagtccgccaaggccattctcggcggcagcaaggtgcgcgtggaccaaaagtgcaagtcgtccgcccagatcgaccccacccccgtgatcgtcacctccaacaccaacatgtgcgccgtgattgacgggaacagcaccaccttcgagcaccagcagcctctccaggaccggatgtttaagttcgaactcacccgccgtctggagcacgactttggcaaggtgacaaagcaggaagtcaaagagttcttccgctgggccagtgatcacgtgaccgaggtggcgcatgagttttacgtcagaaagggcggagccagcaaaagacccgcccccgatgacgcggataaaagcgagcccaagcgggcctgcccctcagtcgcggatccatcgacgtcagacgcggaaggagctccggtggactttgccgacaggtaccaaaacaaatgttctcgtcacgcgggcatgcttcagatgctgtttccctgcaaaacgtgcgagagaatgaatcagaatttcaacatttgcttcacacacggggtcagagactgctcagagtgtttccccggcgtgtcagaatctcaaccggtcgtcagaaagaggacgtatcggaaactctgtgcgattcatcatctgctggggcgggctcccgagattgcttgctcggcctgcgatctggtcaacgtggacctggatgactgtgtttctgagcaataaatgacttaaaccaggtatggctgccgatggttatcttccagattggctcgaggacaacctctctgagggcattcgcgagtggtgggcgctgaaacctggagccccgaagcccaaagccaaccagcaaaagcaggacgacggccggggtctggtgcttcctggctacaagtacctcggacccttcaacggactcgacaagggggagcccgtcaacgcggcggacgcagcggccctcgagcacgacaaggcctacgaccagcagctgcaggcgggtgacaatccgtacctgcggtataaccacgccgacgccgagtttcaggagcgtctgcaagaagatacgtcttttgggggcaacctcgggcgagcagtcttccaggccaagaagcgggttctcgaacctctcggtctggttgaggaaggcgctaagacggctcctggaaagaagagaccggtagagccatcaccccagcgttctccagactcctctacgggcatcggcaagaaaggccaacagcccgccagaaaaagactcaattttggtcagactggcgactcagagtcagttccagaccctcaacctctcggagaacctccagcagcgccctctggtgtgggacctaatacaatggctgcaggcggtggcgcaccaatggcagacaataacgaaggcgccgacggagtgggtagttcctcgggaaattggcattgcgattccacatggctgggcgacagagtcatcaccaccagcacccgaacctgggccctgcccacctacaacaaccacctctacaagcaaatctccaacgggacatcgggaggagccaccaacgacaacacctacttcggctacagcaccccctgggggtattttgactttaacagattccactgccacttttcaccacgtgactggcagcgactcatcaacaacaactggggattccggcccaagagactcagcttcaagctcttcaacatccaggtcaaggaggtcacgcagaatgaaggcaccaagaccatcgccaataacctcaccagcaccatccaggtgtttacggactcggagtaccagctgccgtacgttctcggctctgcccaccagggctgcctgcctccgttcccggcggacgtgttcatgattccccagtacggctacctaacactcaacaacggtagtcaggccgtgggacgctcctccttctactgcctggaatactttccttcgcagatgctgagaaccggcaacaacttccagtttacttacaccttcgaggacgtgcctttccacagcagctacgcccacagccagagcttggaccggctgatgaatcctctgattgaccagtacctgtactacttgtctcggactcaaacaacaggaggcacggcaaatacgcagactctgggcttcagccaaggtgggcctaatacaatggccaatcaggcaaagaactggctgccaggaccctgttaccgccaacaacgcgtctcaacgacaaccgggcaaaacaacaatagcaactttgcctggactgctgggaccaaataccatctgaatggaagaaattcattggctaatcctggcatcgctatggcaacacacaaagacgacgaggagcgtttttttcccagtaacgggatcctgatttttggcaaacaaaatgctgccagagacaatgcggattacagcgatgtcatgctcaccagcgaggaagaaatcaaaaccactaaccctgtggctacagaggaatacggtatcgtggcagataacttgcagcagcaaaacacggctcctcaaattggaactgtcaacagccagggggccttacccggtatggtctggcagaaccgggacgtgtacctgcagggtcccatctgggccaagattcctcacacggacggcaacttccacccgtctccgctgatgggcggctttggcctgaaacatcctccgcctcagatcctgatcaagaacacgcctgtacctgcggatcctccgaccaccttcaaccagtcaaagctgaactctttcatcacgcaatacagcaccggacaggtcagcgtggaaattgaatgggagctgcagaaggaaaacagcaagcgctggaaccccgagatccagtacacctccaactactacaaatctacaagtgtggactttgctgttaatacagaaggcgtgtactctgaaccccgccccattggcacccgttacctcacccgtaatctgtaattgcctgttaatcaataaaccggttgattcgtttcagttgaactttggtctctgcg

SEQ ID NO: 114 - protein, 738 aa, Adeno-associated virus 8; identical to SEQ ID NO: 105

SEQ ID NO: 115 - protein, 737 aa, Adeno-associated virus 8
MAADGYLPDWLEDNLSEGIREWWALKPGAPKPKANQQKQDDGRGLVLPGYKYLGPFNGLDKGEPVNAADAAALEHDKAYDQQLQAGDNPYLRYNHADAEFQERLQEDTSFGGNLGRAVFQAKKRVLEPLGLVEEGAKTAPGKKRPVEPSPQRSPDSSTGIGKKGQQPARKRLNFGQTGDSESVPDPQPLGEPPAAPSGVGPNTMAAGGGAPMADNNEGADGVGSSSGNWHCDSTWLGDRVITTSTRTWALPTYNNHLYKQISNGTSGGATNDNTYFGYSTPWGYFDFNRFHCHFSPRDWQRLINNNWGFRPKRLSFKLFNIQVKEVTQNEGTKTIANNLTSTIQVFTDSEYQLPYVLGSAHQGCLPPFPADVFMIPQYGYLTLNNGSQAVGRSSFYCLEYFPSQMLRTGNNFQFTYTFEDVPFHSSYAHSQSLDRLMNPLIDQYLYYLSRTQTTGGTANTQTLGFSQGGPNTMANQAKNWLPGPCYRQQRVSTTTGQNNNSNFAWTAGTKYHLNGRNSLANPGIAMATHKDDEERFFPSNGILIFGKQNAARDNADYSDVMLTSEEEIKTTNPVATEEYGIVADNLQQQNTAPQIGTVNSQGALPGMVWQNRDVYLQGPIWAKIPHTDGNFHPSPLMGGFGLKHPPPQILIKNTPVPADPPTTFNQSKLNSFITQYSTGQVSVEIEWELQKENSKRWNPEIQYTSNYYKSTSVDFAVIQKACTLNPAPLAPVTSPVI

SEQ ID NO: 116 - DNA, 2217 bp, Adeno-associated virus 8; identical to SEQ ID NO: 111

SEQ ID NO: 117 - DNA, 2214 bp, Artificial Sequence
  Description of Artificial Sequence: Synthetic polypeptide
atggctgccgatggttatcttccagattggctcgaggacaacctctctgagggcattcgcgagtggtgggcgctgaaacctggagccccgaagcccaaagccaaccagcaaaagcaggacgacggccggggtctggtgcttcctggctacaagtacctcggacccttcaacggactcgacaagggggagcccgtcaacgcggcggacgcagcggccctcgagcacgacaaggcctacgaccagcagctgcaggcgggtgacaatccgtacctgcggtataaccacgccgacgccgagtttcaggagcgtctgcaagaagatacgtcttttgggggcaacctcgggcgagcagtcttccaggccaagaagcgggttctcgaacctctcggtctggttgaggaaggcgctaagacggctcctggaaagaagagaccggtagagccatcaccccagcgttctccagactcctctacgggcatcggcaagaaaggccaacagcccgccagaaaaagactcaattttggtcagactggcgactcagagtcagttccagaccctcaacctctcggagaacctccagcagcgccctctggtgtgggacctaatacaatggctgcaggcggtggcgcaccaatggcagacaataacgaaggcgccgacggagtgggtagttcctcgggaaattggcattgcgattccacatggctgggcgacagagtcatcaccaccagcacccgaacctgggccctgcccacctacaacaaccacctctacaagcaaatctccaacgggacatcgggaggagccaccaacgacaacacctacttcggctacagcaccccctgggggtattttgactttaacagattccactgccacttttcaccacgtgactggcagcgactcatcaacaacaactggggattccggcccaagagactcagcttcaagctcttcaacatccaggtcaaggaggtcacgcagaatgaaggcaccaagaccatcgccaataacctcaccagcaccatccaggtgtttacggactcggagtaccagctgccgtacgttctcggctctgcccaccagggctgcctgcctccgttcccggcggacgtgttcatgattccccagtacggctacctaacactcaacaacggtagtcaggccgtgggacgctcctccttctactgcctggaatactttccttcgcagatgctgagaaccggcaacaacttccagtttacttacaccttcgaggacgtgcctttccacagcagctacgcccacagccagagcttggaccggctgatgaatcctctgattgaccagtacctgtactacttgtctcggactcaaacaacaggaggcacggcaaatacgcagactctgggcttcagccaaggtgggcctaatacaatggccaatcaggcaaagaactggctgccaggaccctgttaccgccaacaacgcgtctcaacgacaaccgggcaaaacaacaatagcaactttgcctggactgctgggaccaaataccatctgaatggaagaaattcattggctaatcctggcatcgctatggcaacacacaaagacgacgaggagcgtttttttcccagtaacgggatcctgatttttggcaaacaaaatgctgccagagacaatgcggattacagcgatgtcatgctcaccagcgaggaagaaatcaaaaccactaaccctgtggctacagaggaatacggtatcgtggcagataacttgcctgagcggacggcgatgagtcttccgggaactgtcaacagccagggggccttacccggtatggtctggcagaaccgggacgtgtacctgcagggtcccatctgggccaagattcctcacacggacggcaacttccacccgtctccgctgatgggcggctttggcctgaaacatcctccgcctcagatcctgatcaagaacacgcctgtacctgcggatcctccgaccaccttcaaccagtcaaagctgaactctttcatcacgcaatacagcaccggacaggtcagcgtggaaattgaatgggagctgcagaaggaaaacagcaagcgctggaaccccgagatccagtacacctccaactactacaaatctacaagtgtggactttgctgttaatacagaaggcgtgtactctgaaccccgccccattggcacccgttacctcacccgtaatctg

SEQ ID NO: 118 - protein, 738 aa, Artificial Sequence
  Description of Artificial Sequence: Synthetic polypeptide
MAADGYLPDWLEDNLSEGIREWWALKPGAPKPKANQQKQDDGRGLVLPGYKYLGPFNGLDKGEPVNAADAAALEHDKAYDQQLQAGDNPYLRYNHADAEFQERLQEDTSFGGNLGRAVFQAKKRVLEPLGLVEEGAKTAPGKKRPVEPSPQRSPDSSTGIGKKGQQPARKRLNFGQTGDSESVPDPQPLGEPPAAPSGVGPNTMAAGGGAPMADNNEGADGVGSSSGNWHCDSTWLGDRVITTSTRTWALPTYNNHLYKQISNGTSGGATNDNTYFGYSTPWGYFDFNRFHCHFSPRDWQRLINNNWGFRPKRLSFKLFNIQVKEVTQNEGTKTIANNLTSTIQVFTDSEYQLPYVLGSAHQGCLPPFPADVFMIPQYGYLTLNNGSQAVGRSSFYCLEYFPSQMLRTGNNFQFTYTFEDVPFHSSYAHSQSLDRLMNPLIDQYLYYLSRTQTTGGTANTQTLGFSQGGPNTMANQAKNWLPGPCYRQQRVSTTTGQNNNSNFAWTAGTKYHLNGRNSLANPGIAMATHKDDEERFFPSNGILIFGKQNAARDNADYSDVMLTSEEEIKTTNPVATEEYGIVADNLPERTAMSLPGTVNSQGALPGMVWQNRDVYLQGPIWAKIPHTDGNFHPSPLMGGFGLKHPPPQILIKNTPVPADPPTTFNQSKLNSFITQYSTGQVSVEIEWELQKENSKRWNPEIQYTSNYYKSTSVDFAVNTEGVYSEPRPIGTRYLTRNL

SEQ ID NO: 119 - DNA, 2214 bp, Artificial Sequence
  Description of Artificial Sequence: Synthetic polynucleotide
atggctgccgatggttatcttccagattggctcgaggacaacctctctgagggcattcgcgagtggtgggcgctgaaacctggagccccgaagcccaaagccaaccagcaaaagcaggacgacggccggggtctggtgcttcctggctacaagtacctcggacccttcaacggactcgacaagggggagcccgtcaacgcggcggacgcagcggccctcgagcacgacaaggcctacgaccagcagctgcaggcgggtgacaatccgtacctgcggtataaccacgccgacgccgagtttcaggagcgtctgcaagaagatacgtcttttgggggcaacctcgggcgagcagtcttccaggccaagaagcgggttctcgaacctctcggtctggttgaggaaggcgctaagacggctcctggaaagaagagaccggtagagccatcaccccagcgttctccagactcctctacgggcatcggcaagaaaggccaacagcccgccagaaaaagactcaattttggtcagactggcgactcagagtcagttccagaccctcaacctctcggagaacctccagcagcgccctctggtgtgggacctaatacaatggctgcaggcggtggcgcaccaatggcagacaataacgaaggcgccgacggagtgggtagttcctcgggaaattggcattgcgattccacatggctgggcgacagagtcatcaccaccagcacccgaacctgggccctgcccacctacaacaaccacctctacaagcaaatctccaacgggacatcgggaggagccaccaacgacaacacctacttcggctacagcaccccctgggggtattttgactttaacagattccactgccacttttcaccacgtgactggcagcgactcatcaacaacaactggggattccggcccaagagactcagcttcaagctcttcaacatccaggtcaaggaggtcacgcagaatgaaggcaccaagaccatcgccaataacctcaccagcaccatccaggtgtttacggactcggagtaccagctgccgtacgttctcggctctgcccaccagggctgcctgcctccgttcccggcggacgtgttcatgattccccagtacggctacctaacactcaacaacggtagtcaggccgtgggacgctcctccttctactgcctggaatactttccttcgcagatgctgagaaccggcaacaacttccagtttacttacaccttcgaggacgtgcctttccacagcagctacgcccacagccagagcttggaccggctgatgaatcctctgattgaccagtacctgtactacttgtctcggactcaaacaacaggaggcacggcaaatacgcagactctgggcttcagccaaggtgggcctaatacaatggccaatcaggcaaagaactggctgccaggaccctgttaccgccaacaacgcgtctcaacgacaaccgggcaaaacaacaatagcaactttgcctggactgctgggaccaaataccatctgaatggaagaaattcattggctaatcctggcatcgctatggcaacacacaaagacgacgaggagcgtttttttcccagtaacgggatcctgatttttggcaaacaaaatgctgccagagacaatgcggattacagcgatgtcatgctcaccagcgaggaagaaatcaaaaccactaaccctgtggctacagaggaatacggtatcgtggcagataacttgagttttagtcgtgcggttctttgtgatggaactgtcaacagccagggggccttacccggtatggtctggcagaaccgggacgtgtacctgcagggtcccatctgggccaagattcctcacacggacggcaacttccacccgtctccgctgatgggcggctttggcctgaaacatcctccgcctcagatcctgatcaagaacacgcctgtacctgcggatcctccgaccaccttcaaccagtcaaagctgaactctttcatcacgcaatacagcaccggacaggtcagcgtggaaattgaatgggagctgcagaaggaaaacagcaagcgctggaaccccgagatccagtacacctccaactactacaaatctacaagtgtggactttgctgttaatacagaaggcgtgtactctgaaccccgccccattggcacccgttacctcacccgtaatctg

SEQ ID NO: 120 - protein, 738 aa, Artificial Sequence
  Description of Artificial Sequence: Synthetic polypeptide
MAADGYLPDWLEDNLSEGIREWWALKPGAPKPKANQQKQDDGRGLVLPGYKYLGPFNGLDKGEPVNAADAAALEHDKAYDQQLQAGDNPYLRYNHADAEFQERLQEDTSFGGNLGRAVFQAKKRVLEPLGLVEEGAKTAPGKKRPVEPSPQRSPDSSTGIGKKGQQPARKRLNFGQTGDSESVPDPQPLGEPPAAPSGVGPNTMAAGGGAPMADNNEGADGVGSSSGNWHCDSTWLGDRVITTSTRTWALPTYNNHLYKQISNGTSGGATNDNTYFGYSTPWGYFDFNRFHCHFSPRDWQRLINNNWGFRPKRLSFKLFNIQVKEVTQNEGTKTIANNLTSTIQVFTDSEYQLPYVLGSAHQGCLPPFPADVFMIPQYGYLTLNNGSQAVGRSSFYCLEYFPSQMLRTGNNFQFTYTFEDVPFHSSYAHSQSLDRLMNPLIDQYLYYLSRTQTTGGTANTQTLGFSQGGPNTMANQAKNWLPGPCYRQQRVSTTTGQNNNSNFAWTAGTKYHLNGRNSLANPGIAMATHKDDEERFFPSNGILIFGKQNAARDNADYSDVMLTSEEEIKTTNPVATEEYGIVADNLSFSRAVLCDGTVNSQGALPGMVWQNRDVYLQGPIWAKIPHTDGNFHPSPLMGGFGLKHPPPQILIKNTPVPADPPTTFNQSKLNSFITQYSTGQVSVEIEWELQKENSKRWNPEIQYTSNYYKSTSVDFAVNTEGVYSEPRPIGTRYLTRNL

SEQ ID NO: 121 - DNA, 4385 bp, Adeno-associated virus 9
cagagagggagtggccaactccatcactaggggtaatcgcgaagcgcctcccacgctgccgcgtcagcgctgacgtagattacgtcataggggagtggtcctgtattagctgtcacgtgagtgcttttgcgacattttgcgacaccacatggccatttgaggtatatatggccgagtgagcgagcaggatctccattttgaccgcgaaatttgaacgagcagcagccatgccgggcttctacgagattgtgatcaaggtgccgagcgacctggacgagcacctgccgggcatttctgactcttttgtgaactgggtggccgagaaggaatgggagctgcccccggattctgacatggatcggaatctgatcgagcaggcacccctgaccgtggccgagaagctgcagcgcgacttcctggtccaatggcgccgcgtgagtaaggccccggaggccctcttctttgttcagttcgagaagggcgagagctactttcacctgcacgttctggtcgagaccacgggggtcaagtccatggtgctaggccgcttcctgagtcagattcgggagaagctggtccagaccatctaccgcgggatcgagccgaccctgcccaactggttcgcggtgaccaagacgcgtaatggcgccggcggggggaacaaggtggtggacgagtgctacatccccaactacctcctgcccaagactcagcccgagctgcagtgggcgtggactaacatggaggagtatataagcgcgtgcttgaacctggccgagcgcaaacggctcgtggcgcagcacctgacccacgtcagccagacgcaggagcagaacaaggagaatctgaaccccaattctgacgcgcccgtgatcaggtcaaaaacctccgcgcgctacatggagctggtcgggtggctggtggaccggggcatcacctccgagaagcagtggatccaggaggaccaggcctcgtacatctccttcaacgccgcctccaactcgcggtcccagatcaaggccgcgctggacaatgccggcaagatcatggcgctgaccaaatccgcgcccgactacctggtaggcccttcacttccggtggacattacgcagaaccgcatctaccgcatcctgcagctcaacggctacgaccctgcctacgccggctccgtctttctcggctgggcacaaaagaagttcgggaaacgcaacaccatctggctgtttgggccggccaccacgggaaagaccaacatcgcagaagccattgcccacgccgtgcccttctacggctgcgtcaactggaccaatgagaactttcccttcaacgattgcgtcgacaagatggtgatctggtgggaggagggcaagatgacggccaaggtcgtggagtccgccaaggccattctcggcggcagcaaggtgcgcgtggaccaaaagtgcaagtcgtccgcccagatcgaccccactcccgtgatcgtcacctccaacaccaacatgtgcgccgtgattgacgggaacagcaccaccttcgagcaccagcagcctctccaggaccggatgtttaagttcgaactcacccgccgtctggagcacgactttggcaaggtgacaaagcaggaagtcaaagagttcttccgctgggccagtgatcacgtgaccgaggtggcgcatgagttttacgtcagaaagggcggagccagcaaaagacccgcccccgatgacgcggataaaagcgagcccaagcgggcctgcccctcagtcgcggatccatcgacgtcagacgcggaaggagctccggtggactttgccgacaggtaccaaaacaaatgttctcgtcacgcgggcatgcttcagatgctgcttccctgcaaaacgtgcgagagaatgaatcagaatttcaacatttgcttcacacacggggtcagagactgctcagagtgtttccccggcgtgtcagaatctcaaccggtcgtcagaaagaggacgtatcggaaactctgtgcgattcatcatctgctggggcgggctcccgagattgcttgctcggcctgcgatctggtcaacgtggacctggatgactgtgtttctgagcaataaatgacttaaaccaggtatggctgccgatggttatcttccagattggctcgaggacaacctctctgagggcattcgcgagtggtgggcgctgaaacctggagccccgaagcccaaagccaaccagcaaaagcaggacgacggccggggtctggtgcttcctggctacaagtacctcggacccttcaacggactcgacaagggggagcccgtcaacgcggcggacgcagcggccctcgagcacggcaaggcctacgaccagcagctgcaggcgggtgacaatccgtacctgcggtataaccacgccgacgccgagtttcaggagcgtctgcaagaagatacgtcttttgggggcaacctcgggcgagcagtcttccaggccaagaagcgggttctcgaacctctcggtctggttgaggaaggcgctaagacggctcctggaaagaagagaccggtagagccatcaccccagcgttctccagactcctctacgggcatcggcaagaaaggccaacagcccgccagaaaaagactcaattttggtcagactggcgactcagagtcagttccagaccctcaacctctcggagaacctccagcagcgccctctggtgtgggacctaatacaatggctgcaggcggtggcgcaccaatggcagacaataacgaaggcgccgacggagtgggtaattcctcgggaaattggcattgcgattccacatggctgggggacagagtcatcaccaccagcacccgaacctgggcattgcccacctacaacaaccacctctacaagcaaatctccaatggaacatcgggaggaagcaccaacgacaacacctactttggctacagcaccccctgggggtattttgacttcaacagattccactgccacttctcaccacgtgactggcagcgactcatcaacaacaactggggattccggccaaagagactcaacttcaagctgttcaacatccaggtcaaggaggttacgacgaacgaaggcaccaagaccatcgccaataaccttaccagcaccgtccaggtctttacggactcggagtaccagctaccgtacgtcctaggctctgcccaccaaggatgcctgccaccgtttcctgcagacgtcttcatggttcctcagtacggctacctgacgctcaacaatggaagtcaagcgttaggacgttcttctttctactgtctggaatacttcccttctcagatgctgagaaccggcaacaactttcagttcagctacactttcgaggacgtgcctttccacagcagctacgcacacagccagagtctagatcgactgatgaaccccctcatcgaccagtacctatactacctggtcagaacacagacaactggaactgggggaactcaaactttggcattcagccaagcaggccctagctcaatggccaatcaggctagaaactgggtacccgggccttgctaccgtcagcagcgcgtctccacaaccaccaaccaaaataacaacagcaactttgcgtggacgggagctgctaaattcaagctgaacgggagagactcgctaatgaatcctggcgtggctatggcatcgcacaaagacgacgaggaccgcttctttccatcaagtggcgttctcatatttggcaagcaaggagccgggaacgatggagtcgactacagccaggtgctgattacagatgaggaagaaattaaagccaccaaccctgtagccacagaggaatacggagcagtggccatcaacaaccaggccgctaacacgcaggcgcaaactggacttgtgcataaccagggagttattcctggtatggtctggcagaaccgggacgtgtacctgcagggccctatttgggctaaaatacctcacacagatggcaactttcacccgtctcctctgatgggtggatttggactgaaacacccacctccacagattctaattaaaaatacaccagtgccggcagatcctcctcttaccttcaatcaagccaagctgaactctttcatcacgcagtacagcacgggacaagtcagcgtggaaatcgagtgggagctgcagaaagaaaacagcaagcgctggaatccagagatccagtatacttcaaactactacaaatctacaaatgtggactttgctgtcaataccaaaggtgtttactctgagcctcgccccattggtactcgttacctcacccgtaatttgtaattgcctgttaatcaataaaccggttaattcgtttcagttgaactttggtctctgcg

SEQ ID NO: 122 - DNA, 4382 bp, Adeno-associated virus 9
cagagagggagtggccaactccatcactaggggtaatcgcgaagcgcctcccacgctgccgcgtcagcgctgacgtagattacgtcataggggagtggtcctgtattagctgtcacgtgagtgcttttgcgacattttgcgacaccacatggccatttgaggtatatatggccgagtgagcgagcaggatctccattttgaccgcgaaatttgaacgagcagcagccatgccgggcttctacgagattgtgatcaaggtgccgagcgacctggacgagcacctgccgggcatttctgactcttttgtgaactgggtggccgagaaggaatgggagctgcccccggattctgacatggatcggaatctgatcgagcaggcacccctgaccgtggccgagaagctgtagcgcgacttcctggtccaatggcgccgcgtgagtaaggccccggaggccctcttctttgttcagttcgagaagggcgagagctactttcacctgcacgttctggtcgagaccacgggggtcaagtccatggtgctaggccgcttcctgagtcagattcgggagaagctggtccagaccatctaccgcgggatcgagccgaccctgcccaactggttcgcggtgaccaagacgcgtaatggcgccggcggggggaacaaggtggtggacgagtgctacatccccaactacctcctgcccaagactcagcccgagctgcagtgggcgtggactaacatggaggagtatataagcgcgtgcttgaacctggccgagcgcaaacggctcgtggcgcagcacctgacccacgtcagccagacgcaggagcagaacaaggagaatctgaaccccaattctgacgcgcccgtgatcaggtcaaaaacctccgcgcgctacatggagctggtcgggtggctggtggaccggggcatcacctccgagaagcagtggatccaggaggaccaggcctcgtacatctccttcaacgccgcctccaactcgcggtcccagatcaaggccgcgctggacaatgccggcaagatcatggcgctgaccaaatccgcgcccgactacctggtaggcccttcacttccggtggacattacgcagaaccgcatctaccgcatcctgcagctcaacggctacgaccctgcctacgccggctccgtctttctcggctgggcacaaaagaagttcgggaaacgcaacaccatctggctgtttgggccggccaccacgggaaagaccaacatcgcagaagccattgcccacgccgtgcccttctacggctgcgtcaactggaccaatgagaactttcccttcaacgattgcgtcgacaagatggtgatctggtgggaggagggcaagatgacggccaaggtcgtggagtccgccaaggccattctcggcggcagcaaggtgcgcgtggaccaaaagtgcaagtcgtccgcccagatcgaccccactcccgtgatcgtcacctccaacaccaacatgtgcgccgtgattgacgggaacagcaccaccttcgagcaccagcagcctctccaggaccggatgtttaagttcgaactcacccgccgtctggagcacgactttggcaaggtgacaaagcaggaagtcaaagagttcttccgctgggccagtgatcacgtgaccgaggtggcgcatgagttttacgtcagaaagggcggagccagcaaaagacccgcccccgatgacgcggataaaagcgagcccaagcgggcctgcccctcagtcgcggatccatcgacgtcagacgcggaaggagctccggtggactttgccgacaggtaccaaaacaaatgttctcgtcacgcgggcatgcttcagatgctgcttccctgcaaaacgtgcgagagaatgaatcagaatttcaacatttgcttcacacacggggtcagagactgctcagagtgtttccccggcgtgtcagaatctcaaccggtcgtcagaaagaggacgtatcggaaactctgtgcgattcatcatctgctggggcgggctcccgagattgcttgctcggcctgcgatctggtcaacgtggacctggatgactgtgtttctgagcaataaatgacttaaaccaggtatggctgccgatggttatcttccagattggctcgaggacaacctctctgagggcattcgcgagtggtgggacctgaaacctggagccccgaaacccaaagccaaccagcaaaagcaggacgacggccggggtctggtgcttcctggctacaagtacctcggacccttcaacggactcgacaagggggagcccgtcaacgcggcggacgcagcggccctcgagcacgacaaggcctacgaccagcagctcaaagcgggtgacaatccgtacctgcggtataaccacgccgacgccgagtttcaggagcgtctgcaagaagatacgtcttttgggggcaacctcgggcgagcagtcttccaggccaagaagcgggttctcgaacctctcggtctggttgaggaaggcgctaagacggctcctggaaagaagagaccggtagagcagtcaccccaagaaccagactcatcctcgggcatcggcaaatcaggccagcagcccgctaaaaagagactcaattttggtcagactggcgactcagagtcagtccccgacccacaacctctcggagaacctccagaagccccctcaggtctgggacctaatacaatggcttcaggcggtggcgctccaatggcagacaataacgaaggcgccgacggagtgggtaattcctcgggaaattggcattgcgattccacatggctgggggacagagtcatcaccaccagcacccgaacctgggcattgcccacctacaacaaccacctctacaagcaaatctccaatggaacatcgggaggaagcaccaacgacaacacctactttggctacagcaccccctgggggtattttgacttcaacagattccactgccacttctcaccacgtgactggcagcgactcatcaacaacaactggggattccggccaaagagactcaacttcaagctgttcaacatccaggtcaaggaggttacgacgaacgaaggcaccaagaccatcgccaataaccttaccagcaccgtccaggtctttacggactcggagtaccagctaccgtacgtcctaggctctgcccaccaaggatgcctgccaccgtttcctgcagacgtcttcatggttcctcagtacggctacctgacgctcaacaatggaagtcaagcgttaggacgttcttctttctactgtctggaatacttcccttctcagatgctgagaaccggcaacaactttcagttcagctacactttcgaggacgtgcctttccacagcagctacgcacacagccagagtctagatcgactgatgaaccccctcatcgaccagtacctatactacctggtcagaacacagacaactggaactgggggaactcaaactttggcattcagccaagcaggccctagctcaatggccaatcaggctagaaactgggtacccgggccttgctaccgtcagcagcgcgtctccacaaccaccaaccaaaataacaacagcaactttgcgtggacgggagctgctaaattcaagctgaacgggagagactcgctaatgaatcctggcgtggctatggcatcgcacaaagacgacgaggaccgcttctttccatcaagtggcgttctcatatttggcaagcaaggagccgggaacgatggagtcgactacagccaggtgctgattacagatgaggaagaaattaaagccaccaaccctgtagccacagaggaatacggagcagtggccatcaacaaccaggccgctaacacgcaggcgcaaactggacttgtgcataaccagggagttattcctggtatggtctggcagaaccgggacgtgtacctgcagggccctatttgggctaaaatacctcacacagatggcaactttcacccgtctcctctgatgggtggatttggactgaaacacccacctccacagattctaattaaaaatacaccagtgccggcagatcctcctcttaccttcaatcaagccaagctgaactctttcatcacgcagtacagcacgggacaagtcagcgtggaaatcgagtgggagctgcagaaagaaaacagcaagcgctggaatccagagatccagtatacttcaaactactacaaatctacaaatgtggactttgctgtcaataccgaaggtgtttactctgagcctcgccccattggtactcgttacctcacccgtaatttgtaattgcctgttaatcaataaaccggttaattcgtttcagttgaactttggtctctgcg

SEQ ID NO: 123 - protein, 736 aa, Adeno-associated virus 9
MAADGYLPDWLEDNLSEGIREWWALKPGAPQPKANQQHQDNARGLVLPGYKYLGPGNGLDKGEPVNAADAAALEHDKAYDQQLKAGDNPYLKYNHADAEFQERLKEDTSFGGNLGRAVFQAKKRLLEPLGLVEEAAKTAPGKKRPVEQSPQEPDSSAGIGKSGAQPAKKRLNFGQTGDTESVPDPQPIGEPPAAPSGVGSLTMASGGGAPVADNNEGADGVGSSSGNWHCDSQWLGDRVITTSTRTWALPTYNNHLYKQISNSTSGGSSNDNAYFGYSTPWGYFDFNRFHCHFSPRDWQRLINNNWGFRPKRLNFKLFNIQVKEVTDNNGVKTIANNLTSTVQVFTDSDYQLPYVLGSAHEGCLPPFPADVFMIPQYGYLTLNDGSQAVGRSSFYCLEYFPSQMLRTGNNFQFSYEFENVPFHSSYAHSQSLDRLMNPLIDQYLYYLSKTINGSGQNQQTLKFSVAGPSNMAVQGRNYIPGPSYRQQRVSTTVTQNNNSEFAWPGASSWALNGRNSLMNPGPAMASHKEGEDRFFPLSGSLIFGKQGTGRDNVDADKVMITNEEEIKTTNPVATESYGQVATNHQSAQAQAQTGWVQNQGILPGMVWQDRDVYLQGPIWAKIPHTDGNFHPSPLMGGFGMKHPPPQILIKNTPVPADPPTAFNKDKLNSFITQYSTGQVSVEIEWELQKENSKRWNPEIQYTSNYYKSNNVEFAVNTEGVYSEPRPIGTRYLTRNL

SEQ ID NO: 124 - protein, 736 aa, Adeno-associated virus 9
MAADGYLPDWLEDNLSEGIREWWDLKPGAPKPKANQQKQDDGRGLVLPGYKYLGPFNGLDKGEPVNAADAAALEHDKAYDQQLKAGDNPYLRYNHADAEFQERLQEDTSFGGNLGRAVFQAKKRVLEPLGLVEEGAKTAPGKKRPVEQSPQEPDSSSGIGKSGQQPAKKRLNFGQTGDSESVPDPQPLGEPPEAPSGLGPNTMASGGGAPMADNNEGADGVGNSSGNWHCDSTWLGDRVITTSTRTWALPTYNNHLYKQISNGTSGGSTNDNTYFGYSTPWGYFDFNRFHCHFSPRDWQRLINNNWGFRPKRLNFKLFNIQVKEVTTNEGTKTIANNLTSTVQVFTDSEYQLPYVLGSAHQGCLPPFPADVFMVPQYGYLTLNNGSQALGRSSFYCLEYFPSQMLRTGNNFQFSYTFEDVPFHSSYAHSQSLDRLMNPLIDQYLYYLVRTQTTGTGGTQTLAFSQAGPSSMANQARNWVPGPCYRQQRVSTTTNQNNNSNFAWTGAAKFKLNGRDSLMNPGVAMASHKDDEDRFFPSSGVLIFGKQGAGNDGVDYSQVLITDEEEIKATNPVATEEYGAVAINNQAANTQAQTGLVHNQGVIPGMVWQNRDVYLQGPIWAKIPHTDGNFHPSPLMGGFGLKHPPPQILIKNTPVPADPPLTFNQAKLNSFITQYSTGQVSVEIEWELQKENSKRWNPEIQYTSNYYKSTNVDFAVNTEGVYSEPRPIGTRYLTRNL

SEQ ID NO: 125 - protein, 623 aa, Adeno-associated virus 9
MPGFYEIVIKVPSDLDEHLPGISDSFVNWVAEKEWELPPDSDMDRNLIEQAPLTVAEKLQRDFLVQWRRVSKAPEALFFVQFEKGESYFHLHVLVETTGVKSMVLGRFLSQIREKLVQTIYRGIEPTLPNWFAVTKTRNGAGGGNKVVDECYIPNYLLPKTQPELQWAWTNMEEYISACLNLAERKRLVAQHLTHVSQTQEQNKENLNPNSDAPVIRSKTSARYMELVGWLVDRGITSEKQWIQEDQASYISFNAASNSRSQIKAALDNAGKIMALTKSAPDYLVGPSLPVDITQNRIYRILQLNGYDPAYAGSVFLGWAQKKFGKRNTIWLFGPATTGKTNIAEAIAHAVPFYGCVNWTNENFPFNDCVDKMVIWWEEGKMTAKVVESAKAILGGSKVRVDQKCKSSAQIDPTPVIVTSNTNMCAVIDGNSTTFEHQQPLQDRMFKFELTRRLEHDFGKVTKQEVKEFFRWASDHVTEVAHEFYVRKGGASKRPAPDDADKSEPKRACPSVADPSTSDAEGAPVDFADRYQNKCSRHAGMLQMLLPCKTCERMNQNFNICFTHGVRDCSECFPGVSESQPVVRKRTYRKLCAIHHLLGRAPEIACSACDLVNVDLDDCVSEQ

SEQ ID NO: 126 - DNA, 2211 bp, Adeno-associated virus
atggctgccgatggttatcttccagattggctcgaggacaaccttagtgaaggaattcgcgagtggtgggctttgaaacctggagcccctcaacccaaggcaaatcaacaacatcaagacaacgctcgaggtcttgtgcttccgggttacaaataccttggacccggcaacggactcgacaagggggagccggtcaacgcagcagacgcggcggccctcgagcacgacaaggcctacgaccagcagctcaaggccggagacaacccgtacctcaagtacaaccacgccgacgccgagttccaggagcggctcaaagaagatacgtcttttgggggcaacctcgggcgagcagtcttccaggccaaaaagaggcttcttgaacctcttggtctggttgaggaagcggctaagacggctcctggaaagaagaggcctgtagagcagtctcctcaggaaccggactcctccgcgggtattggcaaatcgggtgcacagcccgctaaaaagagactcaatttcggtcagactggcgacacagagtcagtcccagaccctcaaccaatcggagaacctcccgcagccccctcaggtgtgggatctcttacaatggcttcaggtggtggcgcaccagtggcagacaataacgaaggtgccgatggagtgggtagttcctcgggaaattggcattgcgattcccaatggctgggggacagagtcatcaccaccagcacccgaacctgggccctgcccacctacaacaatcacctctacaagcaaatctccaacagcacatctggaggatcttcaaatgacaacgcctacttcggctacagcaccccctgggggtattttgacttcaacagattccactgccacttctcaccacgtgactggcagcgactcatcaacaacaactggggattccggcctaagcgactcaacttcaagctcttcaacattcaggtcaaagaggttacggacaacaatggagtcaagaccatcgccaataaccttaccagcacggtccaggtcttcacggactcagactatcagctcccgtacgtgctcgggtcggctcacgagggctgcctcccgccgttcccagcggacgttttcatgattcctcagtacgggtatctgacgcttaatgatggaagccaggccgtgggtcgttcgtccttttactgcctggaatatttcccgtcgcaaatgctaagaacgggtaacaacttccagttcagctacgagtttgagaacgtacctttccatagcagctacgctcacagccaaagcctggaccgactaatgaatccactcatcgaccaatacttgtactatctctcaaagactattaacggttctggacagaatcaacaaacgctaaaattcagtgtggccggacccagcaacatggctgtccagggaagaaactacatacctggacccagctaccgacaacaacgtgtctcaaccactgtgactcaaaacaacaacagcgaatttgcttggcctggagcttcttcttgggctctcaatggacgtaatagcttgatgaatcctggacctgctatggccagccacaaagaaggagaggaccgtttctttcctttgtctggatctttaatttttggcaaacaaggaactggaagagacaacgtggatgcggacaaagtcatgataaccaacgaagaagaaattaaaactactaacccggtagcaacggagtcctatggacaagtggccacaaaccaccagagtgcccaagcacaggcgcagaccggctgggttcaaaaccaaggaatacttccgggtatggtttggcaggacagagatgtgtacctgcaaggacccatttgggccaaaattcctcacacggacggcaactttcacccttctccgctgatgggagggtttggaatgaagcacccgcctcctcagatcctcatcaaaaacacacctgtacctgcggatcctccaacggccttcaacaaggacaagctgaactctttcatcacccagtattctactggccaagtcagcgtggagatcgagtgggagctgcagaaggaaaacagcaagcgctggaacccggagatccagtacacttccaactattacaagtctaataatgttgaatttgctgttaatactgaaggtgtatatagtgaaccccgccccattggcaccagatacctgactcgtaatctgtaa

SEQ ID NO: 127 - protein, 736 aa, Adeno-associated virus; identical to SEQ ID NO: 123

SEQ ID NO: 128 - DNA, 2460 bp, Adeno-associated virus
ggtaattcctccggaaattggcattgcgattccacatggctgggcgaccgagtcattaccaccagcacccggacttgggccctgcccacctacaacaaccacctctacaagcaaatctccagccaatcgggtgccaccaacgacaaccactacttcggctacagcaccccttgggggtattttgatttcaacagattccactgccatttctcaccacgtgactggcagcgactcatcaacaacaactggggattcatggctgccgatggttatcttccagattggctcgaggacactctctctgaaggaatcagacagtggtggaagctcaaacctggcccaccaccgccgaaacctaaccaacaacaccgggacgacagtaggggtcttgtgcttcctgggtacaagtacctcggacccttcaacggactcgacaaaggagagccggtcaacgaggcagacgccgcggccctcgagcacgacaaagcctacgaccaccagctcaagcaaggggacaacccgtacctcaaatacaaccacgcggacgctgaatttcaggagcgtcttcaagaagatacgtctttcgggggcaacctcgggcgagcagtcttccaggccaaaaagagggtactcgagcctcttggtctggttgaggaagctgttaagacggctcctggaaaaaagagacctatagagcagtctcctgcagaaccggactcttcctcgggcatcggcaaatcaggccagcagcccgctaagaaaagactcaattttggtcagactggcgacacagagtcagtcccagaccctcaaccaatcggagaaccccccgcagccccctctggtgtgggatctaatacaatggcttcaggcggtggggcaccaatggcagacaataacgaaggcgccgacggagtgggtaattcctcgggaaattggcattgcgattccacatggatgggcgacagagttatcaccaccagcacaagaacctgggccctccccacctacaataatcacctctacaagcaaatctccagcgaatcgggagccaccaacgacaaccactacttcggctacagcaccccctgggggtattttgactttaacagattccactgtcacttctcaccacgtgactggcagcgactcatcaacaacaactggggatttagacccaagaaactcaatttcaagctcttcaacatccaagtcaaggaggtcacgcagaatgatggaaccacgaccatcgccaataaccttaccagcacggtgcaggtcttcacagactctgagtaccagctgccctacgtcctcggttcggctcaccagggctgccttccgccgttcccagcagacgtcttcatgattcctcagtacggctacttgactctgaacaatggcagccaagcggtaggacgttcttcattctactgtctagagtattttccctctcagatgctgaggacgggaaacaacttcaccttcagctacacttttgaagacgtgcctttccacagcagctacgcgcacagccagagtctggatcggctgatgaatcctctcattgaccagtacctgtattacctgagcaaaactcagggtacaagtggaacaacgcagcaatcgagactgcagttcagccaagctgggcctagctccatggctcagcaggccaaaaactggctaccgggacccagctaccgacagcagcgaatgtctaagacggctaatgacaacaacaacagtgaatttgcttggactgcagccaccaaatattacctgaatggaagaaattctctggtcaatcccgggcccccaatggccagtcacaaggacgatgaggaaaagtatttccccatgcacggaaatctcatctttggaaaacaaggcacaggaactaccaatgtggacattgaatcagtgcttattacagacgaagaagaaatcagaacaactaatcctgtggctacagaacaatacggacaggttgccaccaaccatcagagtcagaacaccacagcttcctatggaagtgtggacagccagggaatcttacctggaatggtgtggcaggaccgcgatgtctatcttcaaggtcccatttgggccaaaactcctcacacggacggacactttcatccttctccgctcatgggaggctttggactgaaacaccctcctccccagatcctgatcaaaaacacacctgtgccagcgaatcccgcgaccactttcactcctggaaagtttgcttcgttcattacccagtattccaccggacaggtcagcgtggaaatagagtgggagctgcagaaagaaaacagcaaacgctggaacccagaaattcagtacacctccaactacaacaagtcggtgaatgtggagtttaccgtggacgcaaacggtgtttattctgaaccccgccctattggcactcgttaccttacccggaacttg

SEQ ID NO: 129 - DNA, 3123 bp, Adeno-associated virus
gaattcgccctttctacggctgcgtcaactggaccaatgaaaactttcccttcaacgattgcgtcgacaagatggtgatctggtgggaggagggaaagatgaccgccaaggtcgtggaatctgccaaagccattctgggtggaggcaaggttcgtgtggaccagaaatgcaagtcttcggcccagatcgacccgactccggtgattgtcacctctaacaccaacatgtgcgccgtgattgacggaaactcgaccaccttcgagcaccagcagccgttgcaagaccggatgttcaaatttgaacttacccgccgtttggatcatgactttgggaaggtcaccaagcaggaagtcaaagactttttccggtgggctcaagatcacgtgactgaggtggagcatgagttctacgtcaaaaagggtggagccaagaaaaggcccgcccccgatgatgtatatataaatgagcccaagcgggcgcgcgagtcagttgcgcagccatcgacgtcagacgcggaagcttcgataaactacgcggacaggtaccaaaacaaatgttctcgtcacgtgggcatgaatctgatgctgtttccctgtcgacaatgcgaaagaatgaatcagaattcaaatatctgcttcacacacgggcaaaaagactgtttggaatgctttcccgtgtcagaatctcaacccgtttctgtcgtcagaaaaacgtatcagaaactttgttacattcatcatatcatgggaaaagtaccagacgcctgcactgcctgcgacctggtaaatgtggacttggatgactgtatttctgagcaataaatgacttaaatcaggtatggctgctgacggttatcttccagattggctcgaggacactctctctgaaggaatcagacagtggtggaagctcaaacctggcccaccaccgccgaaacctaaccaacaacaccgggacgacagtaggggtcttgtgcttcctgggtacaagtacctcggacccttcaacggactcgacaaaggagagccggtcaacgaggcagacgccgcggccctcgagcacgacaaagcctacgaccaccagctcaagcaaggggacaacccgtacctcaaatacaaccacgcggacgctgaatttcaggagcgtcttcaagaagatacgtctttcgggggcaacctcgggcgagcagtcttccaggccaaaaagagggtactcgagcctcttggtctggttgaggaagctgttaagacggctcctggaaaaaagagacctatagagcagtctcctgcagaaccggactcttcctcgggcatcggcaaatcaggccagcagcccgctaagaaaagactcaattttggtcagactggcgacacagagtcagtcccaggccctcaaccaatcggagaaccccccgcagccccctctggtgtgggatctaatacaatggcttcaggcggtggggcaccaatggcagacaataacgaaggcgccgacggagtgggtaattcctcgggaaattggcattgcgattccacatggatgggcgacagagttatcaccaccagcacaagaacctgggccctccccacctacaataatcacctctacaagcaaatctccagcgaatcgggagccaccaacgacaaccactacttcggctacagcaccccctgggggtattttgactttaacagattccactgtcacttctcaccacgtgactggcagcgactcatcaacaacaactggggatttagacccaagaaactcaatttcaagctcttcaacatccaagtcaaggaggtcacgcagaatgatggaaccacgaccatcgccaataaccttaccagcgcggtgcaggtcttcacagactctgagtaccagctgccctacgtcctcggttcggctcaccagggctgccttccgccgttcccagcagacgtcttcatgattcctcagtacggctacttgactctgaacaatggcagccaagcggtaggacgttcttcattctactgtctagagtattttccctctcagatgctgaggacgggaaacaacttcaccttcagctacacttttgaagacgtgcctttccacagcagctacgcgcacagccagagtctggatcggctgatgaatcctctcattgaccagtacctgtattacctgagcaaaactcagggtacaagtggaacaacgcagcaatcgagactgcagttcagccaagctgggcctagctccatggctcagcaggccaaaaactggctaccgggacccagctaccgacagcagcgaatgtctaagacggctaatgacaacaacaacagtgaatttgcttggactgcagccaccaaatattacctgaatggaagaaattctctggtcaatcccgggcccccagtggccagtcacaaggacgatgaggaaaagtatttccccatgcacggaaatctcatctttggaaaacaaggcacaggaactaccaatgtggacattgaatcagtgcttattacagacgaagaagaaatcagaacaactaatcctgtggctacagaacaatacggacaggttgccaccaaccatcagagtcagaacaccacagcttcctatggaagtgtggacagccagggaatcttacctggaatggtgtggcaggaccgcgatgtctatcttcaaggtcccatttgggccaaaactcctcacacggacggacactttcatccttctccgctcatgggaggctttggactgaaacaccctcctccccagatcctgatcaaaaacacacctgtgccagcgaatcccgcgaccactttcactcctggaaagtttgcttcgttcattacccagtattccacctgacaggtcagcgtggaaatagagtgggagctgcagaaagaaaacagcaaacgctggaacccagaaattcagtacacctccaactacaacaagtcggtgaatgtggagtttaccgtggacgcaaacggtgtttattctgaaccccgccctattggcactcgttaccttacccggaacttgtaatttcctgttaatgaataagccgatttatgcgtttcagttgaactttggtctctgcgaagggcgaattcgtttaaacct

SEQ ID NO: 130 - protein, 735 aa, Adeno-associated virus
MAADGYLPDWLEDTLSEGIRQWWKLKPGPPPPKPNQQHRDDSRGLVLPGYKYLGPFNGLDKGEPVNEADAAALEHDKAYDHQLKQGDNPYLKYNHADAEFQERLQEDTSFGGNLGRAVFQAKKRVLEPLGLVEEAVKTAPGKKRPIEQSPAEPDSSSGIGKSGQQPAKKRLNFGQTGDTESVPGPQPIGEPPAAPSGVGSNTMASGGGAPMADNNEGADGVGNSSGNWHCDSTWMGDRVITTSTRTWALPTYNNHLYKQISSESGATNDNHYFGYSTPWGYFDFNRFHCHFSPRDWQRLINNNWGFRPKKLNFKLFNIQVKEVTQNDGTTTIANNLTSAVQVFTDSEYQLPYVLGSAHQGCLPPFPADVFMIPQYGYLTLNNGSQAVGRSSFYCLEYFPSQMLRTGNNFTFSYTFEDVPFHSSYAHSQSLDRLMNPLIDQYLYYLSKTQGTSGTTQQSRLQFSQAGPSSMAQQAKNWLPGPSYRQQRMSKTANDNNNSEFAWTAATKYYLNGRNSLVNPGPPVASHKDDEEKYFPMHGNLIFGKQGTGTTNVDIESVLITDEEEIRTTNPVATEQYGQVATNHQSQNTTASYGSVDSQGILPGMVWQDRDVYLQGPIWAKTPHTDGHFHPSPLMGGFGLKHPPPQILIKNTPVPANPATTFTPGKFASFITQYSTGQVSVEIEWELQKENSKRWNPEIQYTSNYNKSVNVEFTVDANGVYSEPRPIGTRYLTRNL

SEQ ID NO: 131 - DNA, 3123 bp, Adeno-associated virus
gaattcgccctttctacggctgcgtcaactggaccaatgaaaactttcccttcaacgattgcgtcgacaagatggtgatctggtgggaggagggaaagatgaccgccaaggtcgtggaatctgccaaagccattctgggtggaagcaaggttcgtgtggaccagaaatgcaagtcttcggcccagatcgacccgactccggtgattgtcacctctaacaccaacatgtgcgccgtgattgacggaaactcgaccaccttcgagcaccagcagccgttgcaagaccggatgttcaaatttgaacttacccgccgtttggatcatgactttgggaaggtcaccaagcaggaagtcaaagactttttccggtgggctcaagatcacgtgactgaggtggagcatgagttctacgtcaaaaagggtggagccaagaaaaggcccgcccccgatgatgtatatataaatgagcccaagcgggcgcgcgagtcagttgcgcagccatcgacgtcagacgcggaagcttcgataaactacgcgggcaggtaccaaaacaaatgttctcgtcacgtgggcatgaatctgatgctgtttccctgtcgacaatgcgaaagaatgaatcagaattcaaatatctgcttcacacacgggcaaaaagactgtttggaatgctttcccgtgtcagaatctcaacccgtttctgtcgtcagaaaaacgtatcagaaactttgttacattcatcatatcatgggaaaagaaccagacgcctgcactgcctgcgacctggtaaatgtggacttggatgactgtatttctgagcaataaatgacttaaatcaggtatggctgctgacggttatcttccagattggctcgaggacactctctctgaaggaatcagacagtggtggaagctcaaacctggcccaccaccgccgaaacctaaccaacaacaccgggacgacagtaggggtcttgtgcttcctgggtacaagtacctcggacccttcaacggactcgacaaaggagagccggtcaacgaggcagacgccgcggccctcgagcacgacaaagcctacgaccaccagctcaagcaaggggacaacccgtacctcaaatacaaccacgcggacgctgaatttcaggagcgtcttcaagaagatacgtctttcgggggcaacctcgggcgagcagtcttccaggccaaaaagagggtactcgagcctcttggtctggttgaggaagctgttaagacggctcctggaaaaaagagacctatagagcagtctcctgcagaaccggactcttcctcgggcatcggcgaatcaggccagcagcccgctaagaaaagactcaattttggtcagactggcgacacagagtcagtcccagaccctcaaccaatcggagaaccccccgcagccccctctggtgtgggatctaatacaatggcttcaggcggtggggcaccaatggcagacgataacgaaggcgccgacggagtgggtaattcctcgggaaattggcattgcgattccacatggatgggcgacagagttatcaccaccagcacaagaacctgggccctccccacctacaataatcacctctacaagcaaatctccagcgaatcgggagccaccaacgacaaccactacttcggctacagcaccccctgggggtattttgactttaacagattccactgtcacttctcaccacgtgactggcagcgactcatcaacaacaactggggatttagacccaagaaactcaatttcaagctcttcaacatccaagtcaaggaggtcacgcagaatgatggaaccacgaccatcgccaataaccttaccagcacggtgcaggtcttcacagactctgagtaccagctgccctacgtcctcggttcggctcaccagggctgccttccgccgttcccagcagacgtcttcatgattcctcagtacggctacttgactctgaacaatggcagccaagcggtaggacgttcttcattctactgtctagagtattttccctctcagatgctgaggacgggaaacaacttcaccttcagctacacttttgaagacgtgcctttccacagcagctacgcgcacagccagagtctggatcggctgatgaatcctctcattgaccagtacctgtattacctgagcaaaactcagggtacaagtggaacaacgcagcaatcgagactgcagttcagccaagctgggcctagctccatggctcagcaggccaaaaactggctaccgggacccagctaccgacagcagcgaatgtctaagacggctaatgacaacaacaacagtgaatttgcttggactgcagccaccaaatattacctgaatggaagaaattctctggtcaatcccgggcccccaatggccagtcacaaggacgatgaggaaaagtatttccccatgcacggaaatctcatctttggaaaacaaggcacaggaactaccaatgtggacattgaatcagtgcttattacagacgaagaagaaatcagaacaactaatcctgtggctacagaacaatacggacaggttgccaccaaccatcagagtcaggacaccacagcttcctatggaagtgtggacagccagggaatcttacctggaatggtgtggcaggaccgcgatgtctatcttcaaggtcccatttgggccaaaactcctcacacggacggacactttcatccttctccgctcatgggaggctttggactgaaacaccctcctccccagatcctgatcaaaaacacacctgtgccagcgaatcccgcgaccactttcactcctggaaagtttgcttcgttcattacccagtattccaccggacaggtcagcgtggaaatagagtgggagctgcagaaagaaaacagcaaacgctggaacccagaaattcagtacacctccaactacaacaagtcggtgaatgtggagtttaccgtggacgcaaacggtgtttattctgaaccccgccctattggcactcgttaccttacccggaacttgtaatttcctgttaatgaataaaccgatttatgcgtttcagttgaactttggtctctgcgaagggcgaattcgcggccgcta

SEQ ID NO: 132 - protein, 735 aa, Adeno-associated virus
MAADGYLPDWLEDTLSEGIRQWWKLKPGPPPPKPNQQHRDDSRGLVLPGYKYLGPFNGLDKGEPVNEADAAALEHDKAYDHQLKQGDNPYLKYNHADAEFQERLQEDTSFGGNLGRAVFQAKKRVLEPLGLVEEAVKTAPGKKRPIEQSPAEPDSSSGIGESGQQPAKKRLNFGQTGDTESVPDPQPIGEPPAAPSGVGSNTMASGGGAPMADDNEGADGVGNSSGNWHCDSTWMGDRVITTSTRTWALPTYNNHLYKQISSESGATNDNHYFGYSTPWGYFDFNRFHCHFSPRDWQRLINNNWGFRPKKLNFKLFNIQVKEVTQNDGTTTIANNLTSTVQVFTDSEYQLPYVLGSAHQGCLPPFPADVFMIPQYGYLTLNNGSQAVGRSSFYCLEYFPSQMLRTGNNFTFSYTFEDVPFHSSYAHSQSLDRLMNPLIDQYLYYLSKTQGTSGTTQQSRLQFSQAGPSSMAQQAKNWLPGPSYRQQRMSKTANDNNNSEFAWTAATKYYLNGRNSLVNPGPPMASHKDDEEKYFPMHGNLIFGKQGTGTTNVDIESVLITDEEEIRTTNPVATEQYGQVATNHQSQDTTASYGSVDSQGILPGMVWQDRDVYLQGPIWAKTPHTDGHFHPSPLMGGFGLKHPPPQILIKNTPVPANPATTFTPGKFASFITQYSTGQVSVEIEWELQKENSKRWNPEIQYTSNYNKSVNVEFTVDANGVYSEPRPIGTRYLTRNL

SEQ ID NO: 133 - DNA, 3113 bp, Adeno-associated virus
gaattcgccctttctacggctgcgtcaactggaccaatgaaaactttcccttcaacgattgcgtcgacaagatggtgatctggtgggaggagggaaagatgaccgccaaggtcgtggaatctgccaaagccattctgggtggaagcaaggttcgtgtggaccagaaatgcaagtcttcggcccagatcgacccgactccggtgattgtcacctctaacaccaacatgtgcgccgtgattgacggaaactcgaccaccttcgagcaccagcagccgttgcaagaccggatgttcaaatttgaacttacccgccgtttggatcatgactttgggaaggtcaccaagcaggaagtcaaagactttttccggtgggctcaagatcacgtgactgaggtggagcatgagttctacgtcaaaaagggtggagccaagaaaaggcccgcccccgatgatgtatatataaatgagcccaagcgggcgcgcgagtcagttgcgcagccatcgacgtcagacgcggaagcttcgataaactacgcggacaggtaccaaaacaaatgttctcgtcacgtgggcatgaatctgatgctgtttccctgtcgacaatgcgaaagaatgaatcagaattcaaatatctgcttcacacacgggcaaaaagactgtttggaatgctttcccgtgtcagaatctcaacccgttcctgtcgtcagaaaaacgtatcagaaactttgttacattcatcatatcatgggaaaagtaccagacgcctgcactgcctgcgacctggtaaatgtggacttggatgactgtatttctgagcaataaatgacttaaatcaggtatggctgctgacggttatcttccagattggctcgaggacactctctctgaaggaatcagacagtggtggaagctcaaacctggcccaccaccgccgaaacctaaccaacaacaccgggacgacagtaggggtcttgtgcttcctgggtacaagtacctcggacccttcaacggactcgacaaaggagagccggtcaacgaggcagacgccgcggccctcgagcacgacaaagcctacgaccaccagctcaagcaaggggacaacccgtacctcaaatacaaccacgcggacgctgaatttcaggagcgtcttcaagaagatacgtctttcgggggcaacctcgggcgagcagtcttccaggccaaaaagagggtactcgagcctcttggtctggttgaggaagctgttaagacggctcctggaaaaaagagacctatagagcagtctcctgcagaaccggactcttcctcgggcatcggcaaatcaggccagcagcccgctaagaaaagactcaattttggtcagactggcgacacagagtcagtcccagaccctcaaccaatcggagaaccccccgcagccccctctggtgtgggatctaatacaatggcttcaggcggtggggcaccaatggcagacaataacgaaggcgccgacggagtgggtaattcctcgggaaattggcattgcgattccacatggatgggcgacagagttatcaccaccagcacaagaacctgggccctccccacctacaataatcacctctacaagcaaatctccagcgaatcgggagccaccaacgacaaccactacttcggctacagcaccccctgggggtattttgactttaacagattccactgtcacttctcaccacgtgactggcagcgactcatcaataacaactggggatttagacccaagaaactcaatttcaagctcttcaacatccaagtcaaggaggtcacgcagaatgatggaaccacgaccatcgccaataaccttaccagcacggtgcaggtcttcacagactctgagtaccagctgccctacgtcctcggttcggctcaccagggctgccttccgccgttcccagcagacgtcttcatgattcctcagtacggctacttgactctgaacaatggcagccaagcggtaggacgttcttcattctactgtctagagtattttccctctcagatgctgaggacgggaaacaacttcaccttcagctacacttttgaagacgtgcctttccacagcagctacgcgcacagccagagtctggatcggctgatgaatcctctcattgaccagtacctgtattacctgagcaaaactcagggtacaagtggaacaacgcagcaatcgagactgcagttcaaccaagctgggcctagctccatggctcagcaggccaaaaactggctaccgggacccagctaccgacagcagcgaatgtctaagacggctaatgacaacaacaacagtgaatttgcttggactgcagccaccaaatattacccgaatggaagaaattctctggtcaatcccgggcccccaatggccagtcacaaggacgatgaggaaaagtatttccccatgcacggaaatctcatctttggaaaacaaggcacaggaactaccaatgtggacattgaatcagtgcttattacagacgaagaagaaatcagaacgactaatcctgtggctacagaacaatacggacaggttgccaccaaccgtcagagtcagaacaccacagcttcctatggaagtgtggacagccagggaatcttacctggaatggtgtggcaggaccgcgatgtctatcttcaaggtcccatttgggccaaaactcctcacacggacggacactttcatccttctccgctcatgggaggctttggactgaaacaccctcctccccagatcctgatcaaaaacacacctgtgccagcgaatcccgcgaccactttcactcctggaaagtttgcttcgttcattacccagtattccaccggacaggtcagcgtggaaatagagtgggagctgcagaaagaaaacagcaaacgctggaacccggaaattcagtacacctccaactacaacaagtcggtgaatgtggagtttaccgtggacgcaaacggtgtttattctgaaccccgccctattggcactcgttaccttacccggaacttgtaatttcctgttaatgaataaaccgatttatgcgtttcagttgaactttggtctctgcgaagggcgaattc

SEQ ID NO: 134 - protein, 735 aa, Adeno-associated virus
MAADGYLPDWLEDTLSEGIRQWWKLKPGPPPPKPNQQHRDDSRGLVLPGYKYLGPFNGLDKGEPVNEADAAALEHDKAYDHQLKQGDNPYLKYNHADAEFQERLQEDTSFGGNLGRAVFQAKKRVLEPLGLVEEAVKTAPGKKRPIEQSPAEPDSSSGIGKSGQQPAKKRLNFGQTGDTESVPDPQPIGEPPAAPSGVGSNTMASGGGAPMADNNEGADGVGNSSGNWHCDSTWMGDRVITTSTRTWALPTYNNHLYKQISSESGATNDNHYFGYSTPWGYFDFNRFHCHFSPRDWQRLINNNWGFRPKKLNFKLFNIQVKEVTQNDGTTTIANNLTSTVQVFTDSEYQLPYVLGSAHQGCLPPFPADVFMIPQYGYLTLNNGSQAVGRSSFYCLEYFPSQMLRTGNNFTFSYTFEDVPFHSSYAHSQSLDRLMNPLIDQYLYYLSKTQGTSGTTQQSRLQFNQAGPSSMAQQAKNWLPGPSYRQQRMSKTANDNNNSEFAWTAATKYYPNGRNSLVNPGPPMASHKDDEEKYFPMHGNLIFGKQGTGTTNVDIESVLITDEEEIRTTNPVATEQYGQVATNRQSQNTTASYGSVDSQGILPGMVWQDRDVYLQGPIWAKTPHTDGHFHPSPLMGGFGLKHPPPQILIKNTPVPANPATTFTPGKFASFITQYSTGQVSVEIEWELQKENSKRWNPEIQYTSNYNKSVNVEFTVDANGVYSEPRPIGTRYLTRNL

SEQ ID NO: 135 - DNA, 3122 bp, Adeno-associated virus
agcggccgcgaattcgccctttctacggctgcgtcaactggaccaatgaaaactttcccttcaacgattgcgtcgacaagatggtgatctggtgggaggagggaaagatgaccgccaaggtcgtggaatctgccaaagccattctgggtggaagcaaggttcgtgtggaccagaaatgcaggtcttcggcccagatcgacccgactccggtgattgtcacctctaacaccaacatgtgcgccgtgattgacggaaactcgaccaccttcgagcaccagcagccgttgcaagaccggatgttcaaatttgaacttacccgccgtttggatcatgactttgggaaggtcaccaagcaggaagtcaaagactttttccggtgggctcaagatcacgtgactgaggtggagcatgagttctacgtcaaaaagggtggagccaagaaaaggcccgcccccgatgatgtatatataaatgagcccaagcgggcgcgcgagtcagttgcgcagccatcgacgtcagacgcggaagcttcgataaactacgcggacaggtaccaaaacaaatgttctcgtcacgtgggcatgaatctgatgctgtttccctgtcgacaatgcgaaagaatgaatcagaattcaaatatctgcttcacacacgggcaaaaagactgtttggaatgctttcccgtgtcagaatctcaacccgtttctgtcgtcagaaaaacgtatcagaaactttgttacattcatcatatcatgggaaaagtaccagacgcctgcactgcctgcgacctggtaaatgtggacttggatgactgtatttctgagcaataaatgacttaaatcaggtatggctgctgacggttatcttccagattggctcgaggacactctctctgaaggaatcagacagtggtggaagctcaaacctggcccaccaccgccgaaacctaaccaacaacaccgggacgacagtaggggtcttgtgcttcctgggtacaagtacctcggacccttcaacggactcgacaaaggagagccggtcaacgaggcagacgccgcggccctcgagcacgacaaagcctacgaccaccagctcaagcaaggggacaacccgtacctcaaatacaaccacgcggacgctgaatttcaggagcgtcttcaagaagatacgtctttcgggggcaacctcgggcgagcagtcttccaggccaaaaagagggtactcgagcctcttggtctggttgaggaagctgttaagacggctcctggaaaaaagagacctatagagcagtctcctgcagaaccggactcttcctcgggcatcggcaaatcaggccagcagcccgctaagaaaagactcaattttggtcagactggcgacacagagtcagtcccagaccctcaaccaatcggagaaccccccgcagccccctctggtgtgggatctaatacaatggcttcaggcggtggggcaccaatggcagacaataacgaaggcgccgacggagtgggtaattcctcgggaaattggcattgcgattccacatggatgggcgacagagttatcaccaccagcacaagaacctgggccctccccacctacaataatcgcctctacaagcaaatctccagcgaatcgggagccaccaacgacaaccactacttcggctacagcaccccctgggggtattttgactttaacagattccactgtcacttctcaccacgtgactggcagcgactcatcaacaacaactggggatttagacccaagaaactcaatttcaagctcttcaacatccaagtcaaggaggtcacgcagaatgatggaaccacgaccatcgccaataaccttaccagcacggtgcaggtcttcacagactctgagtaccagctgccctacgtcctcggttcggctcaccagggctgccttccgccgttcccagcagacgtcttcatgattcctcagtacggctacttgactctgaacaatggcagccaagcggtaggacgttcttcattctactgtctagagtattttccctctcagatgctgaggacgggaaacaacttcaccttcagctacacttttgaagacgtgcctttccacagcagctacgcgcacagccagagtctggatcggctgatgaatcctctcattgaccagtacctgtattacctgagcaaaactcagggtacaagtggaacaacgcagcaatcgagactgcagttcagccaagctgggcctagctccatggctcagcaggccaaaaactggctaccgggacccagctaccgacagcagcgaatgtctaagacggctaatgacaacaacaacagtgaatttgcttggactgcagccaccaaatattacctgaatggaagaaattctctggtcaatcccgggcccccaatggccagtcacaaggacgatgaggaaaagtatttccccatgcacggaaatctcatctttggaaaacaaggcacaggaactaccaatgtggacattgaatcagtgcttattacagacgaagaagaaatcagaacaactaatcctgtggctacagaacaatacggacaggttgccaccaaccatcagagtcagaacaccacagcttcctatggaagtgtggacagccagggaatcttacctggaatggtgtggcaggaccgcgatgtctatcttcaaggtcccatttgggccaaaactcctcacacggacggacactttcatccttctccgctcatgggaggctttggactgaaacaccctcctccccagatcctgatcaaaaacacacctgtgccagcgaatcccgcgaccactttcactcctggaaagtttgcttcgttcattacccagtattccaccggacaggtcagcgtggaaatagagtgggagctgcagaaagaaaacagcaaacgctggaacccagaaattcagtacacctccaactacaacaagtcggtgaatgtggagtttaccgtggacgcaaacggtgtttattctgaaccccgccctattggcactcgttaccttacccggaacttgtaatttcctgttaatgaataaaccgatttatgcgtttcagttgaactttggtctctgcgaagggcgaattc

SEQ ID NO: 136 - protein, 735 aa, Adeno-associated virus
MAADGYLPDWLEDTLSEGIRQWWKLKPGPPPPKPNQQHRDDSRGLVLPGYKYLGPFNGLDKGEPVNEADAAALEHDKAYDHQLKQGDNPYLKYNHADAEFQERLQEDTSFGGNLGRAVFQAKKRVLEPLGLVEEAVKTAPGKKRPIEQSPAEPDSSSGIGKSGQQPAKKRLNFGQTGDTESVPDPQPIGEPPAAPSGVGSNTMASGGGAPMADNNEGADGVGNSSGNWHCDSTWMGDRVITTSTRTWALPTYNNRLYKQISSESGATNDNHYFGYSTPWGYFDFNRFHCHFSPRDWQRLINNNWGFRPKKLNFKLFNIQVKEVTQNDGTTTIANNLTSTVQVFTDSEYQLPYVLGSAHQGCLPPFPADVFMIPQYGYLTLNNGSQAVGRSSFYCLEYFPSQMLRTGNNFTFSYTFEDVPFHSSYAHSQSLDRLMNPLIDQYLYYLSKTQGTSGTTQQSRLQFSQAGPSSMAQQAKNWLPGPSYRQQRMSKTANDNNNSEFAWTAATKYYLNGRNSLVNPGPPMASHKDDEEKYFPMHGNLIFGKQGTGTTNVDIESVLITDEEEIRTTNPVATEQYGQVATNHQSQNTTASYGSVDSQGILPGMVWQDRDVYLQGPIWAKTPHTDGHFHPSPLMGGFGLKHPPPQILIKNTPVPANPATTFTPGKFASFITQYSTGQVSVEIEWELQKENSKRWNPEIQYTSNYNKSVNVEFTVDANGVYSEPRPIGTRYLTRNL

SEQ ID NO: 137 - DNA, 3121 bp, Adeno-associated virus
gaattcgcccttcgcagagaccaaagttcaactgaaacgaatcaaccggtttattgattaacaagcaattacagattacgggtgaggtaacgggtgccgatggggcgaggctcagaataagtgccatctgtgttaacagcaaagtccacatttgtagatttgtagtagttggaagtgtattgaatctctgggttccagcgtttgctgttttctttctgcagctcccattcaatttccacgctgacctgtccggtgctgtactgcgtgatgaacgacgccagcttagcttgactgaaggtagttggaggatccgcgggaacaggtgtattcttaatcaggatctgaggaggcgggtgtttcagtccaaagccccccatcagcggcgagggatgaaagtttccgtccgtgtgaggaatcttggcccagataggaccctgcaggtacacgtcccggttctgccagaccatgccaggtaaggctccttgactgttgacggcccctacaataggagcggcgttttgctgttgcaggttatcggccaccacgccgtactgttctgtggccactgggttggtggttttaatttcttcctcactggttagcataacgctgctatagtccacgttgccttttccagctccctgtttcccaaacattaagactccgctggacggaaaaaatcgctcttcgtcgtccttgtgggttgccatagcgacaccgggatttaccagagagtctctgccattcagatgatacttggtggcaccggtccaggcaaagttgctgttgttattttgcgacagtgtcgtggagacgcgttgctgccggtagcagggcccgggtagccagtttttggcctgagccgacatgttattaggcccggcctgagaaaatagcaactgctgagttcctgcggtacctcccgtggactgagtccgagacaggtagtacaggtactggtcgatgagggggttcatcagccggtccaggctttggctgtgcgcgtagctgctgtgaaaaggcacgtcctcaaactggtagctgaactcaaagttgttgcccgttctcagcatttgagaaggaaagtactccaggcagtagaaggaggaacggcccacggcctgactgccattgttcagagtcaggtacccgtactgaggaatcatgaagacgtccgccgggaacggaggcaggcagccctggcgcgcagagccgaggacgtacgggagctggtattccgagtccgtaaagacctgaatcgtgctggtaaggttattggcgatggtcttggtgccttcattctgcgtgacctccttgacctggatgttgaagagcttgaagttgagtctcttgggccggaatccccagttgttgttgatgagtcgctgccagtcacgtggtgagaagtggcagtggaatctgttaaagtcaaaatacccccagggggtgctgtagccgaagtaggtgttgtcgttggtgcttcctcccgaagtcccgttggagatttgcttgtagaggtggttgttgtaggtggggagggcccaggttcgggtgctggtggtgatgactctgtcgcccagccatgtggaatcgcaatgccaatttcctgaggaactacccactccgtcggcgccttcgttattgtctgccattggagcgccaccgcctgcagccattgtaccagatcccagaccagaggggcctgcggggggttctccgattggttgagggtcgggcactgactctgagtcgccagtctgcccaaagttgagtctctttttcgcgggctgctggcctttcttgccgatgcccgtagtggagtctggagaacgctggggtgatggctctaccggtctcttctttccaggagccgtcttagcgccttcctcaaccagaccgagaggttcgagaacccgcttcttggcctggaagactgctcgtccgaggttgcccccaaaagacgtatcttcttgcagacgctcctgaaactcggcgtcggcgtggttataccgcaggtacggattgtcacccgctttgagctgctggtcgtaggccttgtcgtgctcgagggccgctgcgtccgccgcgttgacgggctcccccttgtcgagtccgttgaagggtccgaggtacttgtagccaggaagcaccagaccccggccgtcgtcctgcttttgctggttggctttgggcttcggggctccaggtttcagcgcccaccactcgcgaatgccctcagagaggttgtcctcgagccaatctggaagataaccatcggcagccatacctgatctaaatcatttattgttcaaagatgcagtcatccaaatccacattgaccagatcgcaggcagtgcaagcgtctggcacctttcccatgatatgatgaatgtagcacagtttctgatacgcctttttgacgacagaaacgggttgagattctgacacgggaaagcactctaaacagtctttctgtccgtgagtgaagcagatatttgaattctgattcattctctcgcattgtctgcagggaaacagcatcagattcatgcccacgtgacgagaacatttgttttggtacctgtccgcgtagttgatcgaagcttccgcgtctgacgtcgatggctgcgcaactgactcgcgcacccgtttgggctcacttatatctgcgtcactgggggcgggtcttttcttggctccaccctttttgacgtagaattcatgctccacctcaaccacgtgatcctttgcccaccggaaaaagtctttgacttcctgcttggtgaccttcccaaagtcatgatccagacggcgggtgagttcaaatttgaacatccggtcttgcaacggctgctggtgttcgaaggtcgttgagttcccgtcaatcacggcgcacatgttggtgttggaggtgacgatcacgggagtcgggtctatctgggccgaggacttgcatttctggtccacgcgcaccttgcttcctccgagaatggctttggccgactccacgaccttggcggtcatcttcccctcctcccaccagatcaccatcttgtcgacacagtcgttgaagggaaagttctcattggtccagttgacgcagccgtagaagggcgaattc

SEQ ID NO: 138 - protein, 733 aa, Adeno-associated virus
MAADGYLPDWLEDNLSEGIREWWDLKPGAPKLKANQQKQDDGRGLVLPGYKYLGPFHGLDKGEPVNAADAAALEHDKAYDQQLKAGDNPYLRYNHADAEFQERLQEDTSFGGNLGRAVFQAKKRVLEPLGLVEEGAKTAPGKKRPLESPQEPDSSSGIGKKGKQPAKKRLNFEEDTGAGDGPPEGSDTSAMSSDIEMRAAPGGNAVDAGQGSDGVGNASGDWHCDSTWSEGKVTTTSTRTWVLPTYNNHLYLRLGTTSNSNTYNGFSTPWGYFDFNRFHCHFSPRDWQRLINNNWGLRPKAMRVKIFNIQVKEVTTSNGETTVANNLTSTVQIFADSSYELPYVMDAGQEGSLPPFPNDVFMVPQYGYCGIVTGENQNQTDRNAFYCLEYFPSQMLRTGNNFEMAYNFEKVPFHSMYAHSQSLDRLMNPLLDQYLWHLQSTTSGETLNQGNAATTFGKIRSGDFAFYRKNWLPGPCVKQQRFSKTASQNYKIPASGGNALLKYDTHYTLNNRWSNIAPGPPMATAGPSDGDFSNAQLIFPGPSVTGNTTTSANNLLFTSEGEIAATNPRDTDMFGQIADNNQNATTAPITGNVTAMGVLPGMVWQNRDIYYQGPIWAKIPHADGHFHPSPLIGGFGLKHPPPQIFIKNTPVPANPATTFTAARVDSFITQYSTGQVAVQIEWEIEKERSKRRNPEVQFTSNYGNQSSMLWAPDTTGKYTEPRVIGSRYLTNHL

SEQ ID NO: 139 - protein, 735 aa, Adeno-associated virus
MAADGYLPDWLEDTLSEGIRQWWKLKPGPPPPKPNQQHRDDSRGLVLPGYKYLGPFNGLDKGEPVNEADAAALEHDKAYDHQLKQGDNPYLKYNHADAEFQERLQEDTSFGGNLGRAVFQAKKRVLEPLGLVEEAVKTAPGKKRPIEQSPAEPDSSSGIGKSGQQPAKKRLNFGQTGDTESVPDPQPIGEPPAAPSGVGSNTMASGGGAPMADNNEGADGVGNSSGNWHCDSTWMGDRVITTSTRTWALPTYNNHLYKQISSESGATNDNHYFGYSTPWGYFDFNRFHCHFSPRDWQRLINNNWGFRPKKLNFKLFNIQVKEVTQNDGTTTIANNLTSTVQVFTDSEYQLPYVLGSAHQGCLPPFPADVFMIPQYGYLTLNNGSQAVGRSSFYCLEYFPSQMLRTGNNFTFSYTFEDVPFHSSYAHSQSLDRLMNPLIDQYLYYLSKTQGTSGTTQQSRLQFSQAGPSSMAQQAKNWLPGPSYRQQRMSKTANDNNNSEFAWTAATKYYLNGRNSLVNPGPPMASHKDDEEKYFPMHGNLIFGKQGTGTTNVDIESVLITDEEEIRTTNPVATEQYGQVATNHQSQNTTASYGSVDSQGILPGMVWQDRDVYLQGPIWAKIPHTDGHFHPSPLMGGFGLKHPPPQILIKNTPVPANPATTFTPGKFASFITQYSTGQVSVEIEWELQKENSKRWNPEIQYTSNYNKSVNVEFTVDANGVYSEPRPIGTRYLTRNL

SEQ ID NO: 140 - DNA, 3127 bp, Adeno-associated virus
gcggccgcgaattcgcccttcgcagagaccaaagttcaactgaaacgaatcaaccggtttattgattaacatgcaattacagattacgggtgaggtaacgagtgccaatagggcgaggctcagagtaaacaccctggctgtcaacggcaaagtccacaccagtctgcttttcaaagttggaggtgtactgaatctccgggtcccagcgcttgctgttttccttctgcagctcccactcgatttccacgctgacttgtccggtgctgtactgtgtgatgaacgaagcaaacttggcaggagtaaacacctccggaggattagcgggaacgggagtgttcttgatcaggatctgaggaggcggatgtttaagtccaaagccgcccatcaaaggagacgggtgaaagttgccatccgtgtgaggaatcttggcccagatgggaccctgcaggtacacgtcccggttctgccagaccatgccaggtaaggctccctggttgttgacaacttgtgtctgggctgcagtattagccgcttgtaagttgctgctgactatcccgtattcttccgtggctacaggattagtaggacgaatttcttcttcatttgtcattaacacattttccaatgtagttttgttagttgctccagtttttccaaaaatcaggactccgctggatgggaaaaagcggtcctcgtcgtccttgtgagttgccatggcgacgccgggattaaccaacgagtttctgccgttcaggtgatatttggtggcaccagtccaagcaaagttgctgttgttgttttgatccagcgttttggagaccctttgttgccggaagcagggtccaggtaaccaattcttggcttgttcggccatagttgaaggcccgccctggtaaaactgcagttcccgattgccagctgtgcctcctgggtcactctgtgttctggccaggtagtacaagtactggtcgatgaggggattcatcagccggtccaggctctggctgtgtgcgtagctgctgtggaaaggcacgtcctcgaagctgtagctgaactcaaagttgttgcccgttctcagcatctgagaggggaagtactccaggcagtagaaggaggaacgtcccacagactgactgccattgttgagagtcaggtagccgtactgaggaatcatgaagacgtccgccgggaacggaggcaggcagccctggtgcgcagagccgaggacgtacggcagctggtattccgagtccgagaatacctgaatcgtgctggtaaggttattagcgatggtcgtaacgccgtcattcgtcgtgacctccttgacctggatgttgaagagcttgaaccgcagcttcttgggccggaatccccagttgttgttgatgagtcgctgccagtcacgtggtgagaagtggcagtggaatctgttaaagtcaaaatacccccagggggtgctgtagccgaagtaggtgttgtcgttggtactacctgcagtttcactggagatttgctcgtagaggtggttgttgtaggtgggcagggcccaggttcgggtgctggtggtaatgactctgtcgcccagccatgtggaatcgcaatgccaatttcctgaggcattacccactccgtcggcaccttcgttattgtctgccattggtgcgccaccgcctgcagccactgtaccagatcccacactagagggcgctgctggaggttctccgagaggttgagggtcggggactgactctgagtcgccagtctgaccgaaattgagtctctttctggcgggctgctggcccttcttgccgatgcccgtggaggagtcgggggaacgctgaggtgacggctctaccggtctcttctttgcaggagccgtcttagcgccttcctcaaccagaccgagaggttcgagaacccgcttcttggcctggaagactgctcgcccgaggttgcccccaaatgacgtatcttcttgcagacgctcctgaaactcggcgtcggcgtggttataccgcaggtacgggttgtcacccgcattgagctgctggtcgtaggccttgtcgtgctcgagggccgctgcgtccgccgcgttgacgggctcccccttgtcgagtccgttgaagggtccgaggtacttgtagccaggaagcaccagaccccggccgttgtcctgcttttgctggttggctttgggtttcggggctccaggtttcaggtcccaccactcgcgaatgccctcagagaggttgtcctcgagccaatctggaagataaccatcggcagccatacctgatttaaatcatttattgttcaaagatgcagtcatccaaatccacattgaccagatcgcaggcagtgcaagcgtctggcacctttcccatgatatgatgaatgtagcacagtttctgatacgcctttttgacgacagaaacgggtttagattctgacacgggaaagcactctaaacagtctttctgtccgtgagtgaagcagatatttgaattctgattcattctctcgcattgtctgcagggaaacagcatcagattcatgcccacgtgacgagaacatttgttttggtacctgtctgcgtagttgatcgaagcttccgcgtctgacgtcgatggctgcgcaactgactcgcgcacccgtttgggctcacttatatctgcgtcactgggggcgggtcttttcttggctccaccctttttgacgtagaattcatgctccacctcaaccacgtaatcctttgcccaccggaaaaagtctttgacttcctgcttggtgaccttcccaaagtcatgatccagacggcgggtgagttcaaatttgaacatccggtcttgcaacggctgctggtgttcgaaggtcgttgagttcccgtcgatcacggcgcacatgttggtgttggagatgacgatcgcgggagtcgggtctatctgggccgaggacttgcatttctggtccacgcgcaccttgcttcctccgagaatggctttggccgactccacgaccttggcggtcatcttcccctcctcccaccagatcaccatcttgtcgacacagtcgttgaagggaaagttctcattggtccagttgacgcagccgtagaaagggcgaattc

SEQ ID NO: 141 - protein, 728 aa, Adeno-associated virus
MAADGYLPDWLEDNLSEGIREWWDLKPGAPKPKANQQKQDDGRGLVLPGYKYLRPFNGLDKGEPVNEADAAALEHDKAYDKQLEQGDNPYLKYNHADAEFQERLQEDTSFGGNLGRAVFQAKKRVLEPLGLVEEVAKTAPGKKRPIESPDSSTGIGKKGQQPAKKKLNFGQTGDSESVPDPQPLGEPPAAPSGLGSGTMAAGGGAPMADNNEGADGVGNASGNWHCDSTWLGDRVITTSTRTWALPTYNNHLYKQISSQSGATNDNHFFSYSTPWGYFDFNRFHCHFSPRDWQRLINNNWGFRPRKLRFKLFNIQVKEVTTNDGVTTIANNLTSTIQVFSDSEYQLPYVLGSAHQGCLPPFPADVFMIPQYGYLTLNNGSQSVGRSSFYCLEYFPSQMLRTGNNFEFSYTFEEVPFHSSYVHSQSLDRLMNPLIDQYLYYLARTQSTTGSTRELQFHQAGPNTMAEQSKNWLPGPCYRQQRLSKNIDSNNNSNFAWTGATKYHLNGRNSLTNPGVAMATNKDDEDQFFPINGVLVFGKTGAANKTTLENVLMTSEEEIKTTNPVATEEYGVVSSNLQSSTAGPQTQTVNSQGALPGMVWQNRDVCLQGPIWAKIPHTDGNFHPSPLMGGFGLKHPPPQILIKNTPVPANPPEVFTPAKFASFITQYSTGQVSVEIEWELQKENSKRWNPEIQYTSNYAKSNNVEFAVNNEGVYTEPRPIGTRYLTRNL

SEQ ID NO: 142 - DNA, 3106 bp, Adeno-associated virus
gcggccgcgaattcgcccttcgcagagaccaaagttcaactgaaacgaatcaaccggtttattgattaacaagtaattacaggttacgggtgaggtaacgggtgccaatggggcgaggctcagtataaaccccttcgttgttgacagcaaattccacattattagacttggcataatttgaggtgtactgaatctctggattccagcgtttgctgttttctttctgcagttcccactcgatctccacgctgacctggccggtgctgtactgcgtgataaatgaggcaaacttggcaggagtaaacacctctggaggattagcaggtaccggggtgtttttgatgagaatttgaggaggcgggtgtttgagtccaaatccgcccatcaggggagacgggtgaaagttgccgtccgtgtgaggaattttggcccagatgggaccctgcaggcacacgtcccggttctgccagaccatgccgggcagagccccctggctgttgacagtctgtgtctggggtccggccgtagacgattgcaggttgctggagaccacaccgtattcttctgtagccacgggattggtggttttgatctcctcctcgctggtcattagcacgttttccagcgttgtcttgttggcagcccccgttttgccaaaaaccagcactccgttgatgggaaagaactggtcctcgtcgtccttgttggtggccatggctacgcccgggttggttaatgaatttctaccattcagatggtatttagtggccccggtccaggcaaagttactgttgttgttgctgtctatgttttttgacagtctctgctgccgataacagggtccgggcagccagttctttgattgctcggccatggtgttgggcccagcctgatggaactgcagctcccttgtggaccccgtagtgctctgggtccgggccaggtagtacaggtactggtcgatgaggggattcatcagccggtctaggctctggctgtgcacatagctgctgtggaaaggcacttcctcaaaggtgtagctgaattcaaagttattgcccgttctcagcatctgagaaggaaagtactccaggcagtagaaggaggaacgtcccacagactgactgccgttgtttagagtcagatatccgtactgaggaatcatgaacacgtccgcagggaacggagggaggcagccctggtgcgcagagccgaggacgtacggcagttggtactccgagtccgagaagacctgaatcgtgctggtaaggttattagcgatggtcgtaacgccgtcgttcgtcgtgacctccttgacctggatgttgaacaacttgaaccgcagctttctgggccggaatccccagttgttgttgatgagtcgctgccagtcacgtggtgagaagtggcagtggaatctgttgaagtcaaaatagccccagggggtgctgtagctgaagaagtggttgtcgttggtagccccgctctgacttgatatctgcttgtagaggtggttgttgtaggtgggcagggcccaggtgcgggtgctggtggtgatgactctgtcgcccagccatgtggaatcgcaatgccaatttccggaggcattacccactccgtcggcgccttcgttattgtctgccattggtgcgccaccgcctgcagccattgtaccagatcccagacctgagggcgcggcgggaggttctccgagaggttgggggtcgggcactgactctgagtcgccagtctgcccaaagttgagcttctttttagcgggctgctggcctttcttgccgatgcccgtggaggagtcgggggattctatgggtctcttctttccaggagccgtcttagcgacttcctcaaccagaccgagaggttcgagaacccgcttcttggcctggaagactgctcgcccgaggttgcccccaaaagacgtatcttcttgaagacgctcctgaaactcggcgtcggcgtggttgtacttgaggtacgggttgtccccctgctcgagctgcttgtcgtaggccttgtcgtgctcgagggccgcggcgtctgcctcgttgaccggctctcccttgtcgagtccgttgaagggtctgaggtacttgtagccaggaagcaccagaccccggccgtcgtcctgcttttgctggttggctttgggtttcggggctccaggtttcaagtcccaccactcgcgaatgccctcagagaggttgtcctcgagccaatctggaagataaccatcggcagccatacctggtttaagtcatttattgctcagaaacacagtcatccaggtccacgttgaccagatcgcaggccgagcaagcaatctcgggagcccgccccagcagatgatgaatggcacagagtttccgatacgtcctctttctgacgaccggttgagattctgacacgccggggaaacattctgaacagtctctggtcccgtgcgtgaagcaaatgttgaaattctgattcactctctcgcatgtcttgcagggaaacagcatctgaagcatgcccgcgtgacgagaacatttgttttggtacctgtcggcaaagtccaccggagctccttccgcgtctgacgtcgatggattcgcgactgaggggcaggcccgcttgggctcgcttttatccgcgtcatcgggggcgggtctcttgttggccccaccctttctgacgtagaacccatgcgccacctcggtcacgtgatcctgcgcccagcggaagaaccttttgacttcctgctttgtcaccttgccaaagttatgctccagacggcgggtgggttcaaatttgaacatccggtcctgcaacggctgctggtgctcgaaggtggcgctgttcccgtcaatcacggcgcacatgttggtgttggaggtgacggtcacgggggtggggtcgatctgggcggacgacttgcacttttggtccacgcgcaccttgctgccgccgagaatggccttggcggactccacgaccttggccgtcatcttgccctcctcccaccagatcaccatcttgtcggcgcaatcgttgaagggaaagttctcattggtccagttgacgcagccgtagaaagggcgaattc

SEQ ID NO: 143 - protein, 728 aa, Adeno-associated virus
MAADGYLPDWLEDNLSEGIREWWDLKPGAPKPKANQQKQDDGRGLVLPGYKYLGPFNGLDKGEPVNEADAAALEHDKAYDKQLEQGDNPYLKYNHADAEFQERLQEDTSFGGNLGRAVFQAKKRVLEPLGLVEEGAKTASGKKRPIESPDSSTGIGKKGQQPAKKKLNFGQTGDSESVPDPQPLGEPPAAPSGLGSGTMAAGGGAPMADNNEGADGVGNASGNWHCDSTWLGDRVITTSTRTWALPTYNNHLYKQISSQSGATNDNHFFGYSTPWGYFDFNRFHCHFSPRDWQRLINNNWGFRPRKLRFKLFNIQVKEVTTNDGVTTIANNLTSTIQVFSDSEYQLPYVLGSAHQGCLPPFPADVFMIPQYGYLTLNNGSQSVGRSSFCCLEYFPSQMLRTGNNFEFSYTFEEVPFHSSYAHSQSLDRLMNPLIDQYLYYLARTQSTTGSTRELQFHQAGPNTVAEQSKNWLPGPCYRQQRLSKNIDSNNNSNFAWTGATKYHLNGRNSLTNPGVAMATNKDDEDQFLPINGVLVFGKTGAANKTTLENVLMTSEEEIKTTNPVATEEYGVVSSNLQSSTAGPRTQTVNSQGALPGMVWQNRDVYLQGPIWAEIPHTDGNFHPSPLMGGFGLKHPPPQILIKNTPVPANPPEVFTPAKFASFITQYSTGQVSVEIEWELQKENSKRWNPEIQYTSNYAKSNNVEFAVNNEGVYTEPRPIGTRYLTRNL

SEQ ID NO: 144 - DNA, 3102 bp, Adeno-associated virus
gcggccgcgaattcgcccttcgcagagaccaaagttcaactgaaacgaatcaaccggtttattgattaacaagtaattacaggttacgggtgaggtaacgggtgccaatggggcgaggctcagtataaaccccttcgttgttgacagcaaattccacattattagacttggcataatttgaggtgtactgaatctctggattccagcgtttgctgttttctttctgcagttcccactcgatctccacgctgacctggccggtgctgtactgcgtgataaatgaggcaaacttggcaggagtaaacacctctggaggattagcaggtaccggggtgtttttgatgagaatttgaggaggcgggtgtttgagtccaaatccgcccatcaggggagacgggtgaaagttgccgtccgtgtgaggaatttcggcccagatgggaccctgcaggtacacgtcccggttctgccagaccatgccgggcagagccccctggctgttgacagtctgtgtccggggtccggccgtagacgattgcaggttgctggagaccacaccgtattcttctgtagccacgggattggtggttttgatctcctcctcgctggtcattagcacgttttccagcgttgtcttgttggcagcccccgttttgccaaaaaccagcactccgttgatgggaaggaactggtcctcgtcgtccttgttggtggccatggctacgcccgggttggttaatgaatttctaccattcagatggtatttagtggccccggtccaggcaaagttactgttgttgttgctgtctatgttttttgacagtctctgctgccgataacagggtccgggcagccagttctttgattgctcggccacggtgttgggcccagcctgatggaactgcagctcccttgtggaccccgtagtgctctgggtccgggccaggtagtacaggtactggtcgatgaggggattcatcagccggtccaggctctggctgtgcgcatagctgctgtggaaaggcacttcctcaaaggtgtagctgaattcaaagttattgcccgttctcagcatctgagaaggaaagtactccaggcagcagaaggaggaacgtcccacagactgactgccgttgtttagagtcagatatccgtactgaggaatcatgaacacgtccgcagggaacggagggaggcagccctggtgcgcagagccgaggacgtacggcagttggtactccgagtccgagaagacctgaatcgtgctggtaaggttattagcgatggtcgtaacgccgtcgttcgtcgtgacctccttgacctggatgttgaacaacttgaaccgcagctttctgggccggaatccccagttgttgttgatgagtcgctgccagtcacgtggtgagaagtggcagtggaatctgttgaagtcaaaatagccccagggggtgctgtagccgaagaagtggttgtcgttggtagccccgctctgacttgatatctgcttgtagaggtggttgttgtaggtgggcagggcccaggtgcgggtgctggtggtgatgactctgtcgcccagccatgtggaatcgcaatgccaatttccggaggcattacccactccgtcggcgccttcgttattgtctgccattggtgcgccaccgcctgcagccattgtaccagatcccagacctgagggcgcggcgggaggttctccgagaggttgggggtcgggcactgactctgagtcgccagtctgcccaaagttgagcttctttttagcgggctgctggcctttcttgccgatgcccgtggaggagtcgggggattctatgggtctcttctttccggaagccgtcttagcgccttcctcaaccagaccgagaggttcgagaacccgcttcttggcctggaagactgctcgcccgaggttgcccccaaaagacgtatcttcttgaagacgctcctgaaactcggcgtcggcgtggttgtacttgaggtacgggttgtccccctgctcgagctgcttgtcgtaggccttgtcgtgctcgagggccgcggcgtctgcctcgttgaccggctctcccttgtcgagtccgttgaagggtccgaggtacttgtagccaggaagcaccagaccccggccgtcgtcctgcttttgctggttggctttgggtttcggggctccaggtttcaagtcccaccactcgcgaatgccctcagagaggttgtcctcgagccaatctggaagataaccatcggcagccatacctggtttaagtcatttattgctcagaaacacagtcatccaggtccacgttgaccagatcgcaggccgagcaagcaatctcgggagcccgccccagcagatgatgaatggcacagagtttccgatacgtcctctttctgacgaccggttgagattctgacacgccggggaaacattctgaacagtctctggtcccgtgcgtgaagcaaatgttgaaattctgattcattctctcgcatgtcttgcagggaaacagcatctgaagcatgcccgcgtgacgagaacatttgttttggtacctgtcggcaaagtccaccggagctccttccgcgtctgacgtcgatggatccgcgactgaggggcaagcccgcttgggctcgcttttatccgcgtcatcgggggcgggtctcttgttggctccaccctttctgacgtagaactcatgcgccacctcggtcacgtgatcctgcgcccagcggaagaactctttgacttcctgctttgtcaccttgccaaagtcatgctccagacggcgggtgagttcaaatttgaacatccggtcttgtaacggctgctggtgctcgaaggtggtgctgttcccgtcaatcacggcgcacatgttggtgttggaagtgacgatcacgggggtgggatcgatctgggcggacgacttgcacttttggtccacgcgcaccttgctgccgccgagaatggccttggcggactccacgaccttggccgtcatcttgccctcctcccaccagatcaccatcttgtcgacgcaatcgttgaagggaaagttctcattggtccagttgacgcagccgaagggcgaattc

SEQ ID NO: 145 - protein, 728 aa, Adeno-associated virus
MAADGYLPDWLEDNLSEGIREWWDLKPGAPKPKANQQKQDDGRGLVLPGYRYLGPFNGLDKGEPVNEADAAALEHDKAYDKQLEQGDNPYLKYNHADAEFQERLQEDTSFGGNLGRAVFQAKKRVLEPLGLVEEGAKTAPGKKRPIESPDSSTGIGKNGQPPAKKKLNFGQTGDSESVPDPQPLGEPPAAPSGLGSGTMAAGGGAPMADNNEGADGVGNASGNWHCDSTWLGDRVITTSTRTWALPTYNNHLYKQISSQSGATNDNHFFGYSTPWGYFDFNRFHCHFSPRDWQRLINNNWGFRPRKLRFKLFNIQVKEVTTNDGVTTIANNLTSTIQVFSDSEYQLPYVLGSAHQGCLPPFPADVFMIPQYGYLTLNNGSQSVGRSSFYCLEYFPSQMLRTGNNFEFSYTFEEVPFHSSYAHSQSLDRLMNPLIDQYLYYLARTQSTTGSTRELQFHQAGPNTMAEQSKNWLPGPCYRQQRLSKNIDSNNNSNFAWTGATKYHLNGRNSLTNPGVAMATNKDDEDQFFPINGVLVFGKTGAANKTTLENVLMTSEEEIKTTNPVATEEYGVVSSNLQSSTAGPQTQTVNSQGALPGMVWQNRDVYLQGPIWAKIPHTDGNFHPSPLMGGFGLKHPPPQILIKNTPVPANPPEVFTPAKFASFITQYSTGQVSVEIEWELQKENSKRWNPEIQYTSNYAKSNNVEFAVNNEGVYTEPRPIGTRYLTRNL

SEQ ID NO: 146 - protein, 728 aa, Adeno-associated virus
MAADGYLPDWLEGNLSEGIREWWDLKPGAPKPKANQQKQDDGRGLVLPGYRYLGPFNGLDKGEPVNEADAAALEHDKAYDKQLEQGDNPYLKYNHADAEFQERLQEDTSFGGNLGRAVFQAKKRVLEPLGLVEEGAKTAPGKKRPIESPDSSTGIGKNGQPPAKKKLNFGQTGDSESVPDPQPLGEPPAAPSGLGSGTMAAGGGAPMADNNEGADGVGNASGNWHCDSTWLGDRVITTSTRTWALPTYNNHLYKQISSQSGATNDNHFFGYSTPWGYFDFNRFHCHFSPRDWQRLINNNWGFRPRKLRFKLFNIQVKEVTTNDGVTTIANNLTSTIQVFSDSEYQLPYVLGSAHQGCLPPFPADVFMIPQYGYLTLNNGSQSVGRSSFYCLEYFPSQMLRTGDNFEFSYTFEEVPFHSSYAHSQSLDRLMNPLIDQYLYYLARTQSTTGSTRELQFHQAGPNTMAEQSKNWLPGPCYRQQRLSKNIDSNNNSNFAWTGATKYHLNGRNSLTNPGVAMATNKDDEDQFFPINGVLVFGKTGAANKTTLENVLMTSEEEIKTTNPVATEEYGVVSSNLQSSTAGPQTQTVNSQGALPGMVWQNRDVYLQGPIWAKIPHTDGNFHPSPLMGGFGLKHPPPQILIKNTPVPANPPEVFTPAKFASFITQYSTGQVSVEIEWELQKENSKRWNPEIQYTSNYAKSNNVEFAVNNEGVYTEPRPIGTRYLTRNL

SEQ ID NO: 147 - DNA, 3106 bp, Adeno-associated virus
gcggccgcgaattcgcccttcgcagagaccaaagttcaactgaaacgaatcagccggtttattgattaacaagtaattacaggttacgggtgaggtaacgggtgccaatggggcgaggctcagtataaaccccttcgttgttgacagcaaattccacattattagacttggcataatttgaggtgtactgaatctctggattccagcgtttgctgttttctttctgcagttcccactcgatctccacgctgacctggccggtgctgtactgcgtgataaatgaggcaaacttggcaggagtaaacacctctggaggattagcaggtaccggggtgtttttgatgagaatttgaggaggcgggtgtttgagtccaaatccgcccatcaggggagacgggtgaaagttgccgtccgtgtgaggaattttggcccagatgggaccctgcaggtacacgtcccggttctgccagaccatgccgggcagagccccctggctgttgacagtctgtgtctggggtccggccgtagacgattgcaggttgctggagaccacaccgtattcttctgtagccacgggattggtggttttgatctcctcctcgctggtcattagcacgttttccagcgttgtcttgttggcagcccccgttttgccaaaaaccagcactccgttgatgggaaagaactggtcctcgtcgtccttgttggtggccatggctacgcccgggttggttaatgaatttctaccattcagatggtatttagtggccccggtccaggcaaagttactgttgttgttgctgtctatgttttttgacagtctctgctgccgataacagggtccgggcagccagttctttgattgctcggccatggtgttgggcccagcctgatggaactgcagctcccttgtggaccccgtagtgctctgggtccgggccaggtagtacaggtactggtcgatgaggggattcatcagccggtccaggctctggctgtgcgcatagctgctgtggaaaggcacttcctcaaaggtgtagctgaattcaaagttatcgcccgttctcagcatctgagaaggaaagtactccaggcagtagaaggaggaacgtcccacagactgactgccgttgtttagagtcagatatccgtactgaggaatcatgaacacgtccgcagggaacggagggaggcagccctggtgcgcagagccgaggacgtacggcagttggtactccgagtccgagaagacctgaatcgtgctggtaaggttattagcgatggtcgtaacgccgtcgttcgtcgtgacctccttgacctggatgttgaacaacttgaaccgcagctttctgggccggaatccccagttgttgttgatgagtcgctgccagtcacgtggtgagaagtggcagtggaatctgttgaagtcaaaatagccccagggggtgctgtagccgaagaagtggttgtcgttggtagccccgctctgacttgatatctgcttgtagaggtggttgttgtaggtgggcagggcccaggtgcgggtgctggtggtgatgactctgtcgcccagccatgtggaatcgcaatgccaatttccggaggcattacccactccgtcggcgccttcgttattgtctgccattggtgcgccaccgcctgcagccattgtaccagatcccagacctgagggcgcggcgggaggttctccgagaggttgggggtcgggcactgactctgagtcgccagtctgcccaaagttgagcttctttttagcgggcggctggccgttcttgccgatgcccgtggaggagtcgggggattctatgggtctcttctttccaggagccgtcttagcgccttcctcaaccagaccgagaggttcgagaacccgcttcttggcctggaagactgctcgcccgaggttgcccccaaaagacgtatcttcttgaagacgctcctgaaactcggcgtcggcgtggttgtacttgaggtacgggttgtccccctgctcgagctgcttgtcgtaggccttgtcgtgctcgagggccgcggcgtctgcctcgttgaccggctctcccttgtcgagtccgttgaagggtccgaggtacctgtagccaggaagcaccagaccccggccgtcgtcctgcttttgctggttggctttgggtttcggggctccaggtttcaagtcccaccactcgcgaatgccctcagagaggttgccctcgagccaatctggaagataaccatcggcagccatacctggtttaagtcatttattgctcagaaacacagtcatccaggtccacgttggccagatcgcaggccgagcaagcaatctcgggagcccgccccagcagatgatgaatggcacagagtttccgatacgtcctctttctgacgaccggttgagattctgacacgccggggaaacattctgaacagtctctggtcccgtgcgtgaagcaaatgttgaaattctgattcattctctcgcatgtcttgcaggggaacagcatctgaagcatgcccgcgtgacgagaacatttgttttggtacctgtcggcaaagtccaccggagctccttccgcgtctgacgtcgatggatccgcgactgaggggcaggcccgcttgggctcgcttttatccgcgtcatcgggggcgggtctcttgttggctccaccctttctgacgtagaactcatacgccacctcggtcacgtgatcctgcgcccagcggaagaactctttgacttcctgctttgtcaccttgccaaagtcatgctccagacggcgggtgagttcaaatttgaacatccggtcttgtaacggctgctggtgctcgaaggtggtgctgttcccgtcaatcacggcgcacatgttggtgttggaagtgacgatcacgggggtgggatcgatctgggcggacgacttgcacttttggtccacgcgcaccttgctgccgccgagaatggccttggcggactccacgaccttggccgtcatcctgccctcctcccaccagatcaccatcttgtcgacgcaatcgttgaagggaaagttctcattggtccagttgacgcagccgtagaaagggcgaattc

SEQ ID NO: 148 - protein, 728 aa, Adeno-associated virus
MAADGYLPDWLEDNLSEGIREWWDLKPGAPKPKANQQKQDDGRGLVLPGYKYLGPFNGLDKGEPVNEADAAALEHDKAYDKQLEQGDNPYLKYNHADAEFQERLQEDTSFGGNLGRAVFQAKKRVLEPLGLVEEGAKTAPGKKRPIESPDSSTGIGKKGQQPAKKKLNFGQTGDSESVPDPQPLGEPPAAPSGLGSGTMAAGGGAPMADNNEGADGVGNASGNWHCDSTWLGDRVITTSTRTWALPTYNNHLYKQISSQSGATNDNHFFGYSTPWGYFDFNRFHCHFSPRDWQRLINNNWGFRPRKLRFKLFNIQVKEVTTNDGVTTIANNLTSTIQVFSDSEYQLPYVLGSAHQGCLPPFPADVFMIPQYGYLTLNNGSQSMGRSSFYCLEYFPSQMLRTGNNFEFSYTFEEVPFHSSYAHSQSLDRLMNPLIDQYLYYLARTQSTTGSTRELQFHQAGPNTMAEQSKNWLPGPCYRQQRLSKNIDSNNNSNFAWTGATKYHLNGRNSLTNPGVAMATNKDDEGQFFPINGVLVFGKTGAANKTTLENVLMTSEEEIKTTNPVATEEYGVVSSNLQSSTAGPQTQTVNSQGALPGMVWQNRDVYLQGPIWAKIPHTDGNFHPSPLMGGFGLKHPPPQILIKNTPVPANPPGVFTPALFASFITQYSTGQVSVEIEWELQKENSKRWNPEIQYTSNYAKSNNVEFAVNNEGVYTEPRPIGTRYLTRNL

SEQ ID NO: 149 - DNA, 3098 bp, Adeno-associated virus
gaattcgcccttcgcagagaccaaagttcaactgaaacgaatcaaccggtttattgattaacaagtaattacaggttacgggtgaggtaacgggtgccaatggggcgaggctcagtataaaccccttcgttgttgacagcaaattccacattattagacttggcataatttgaggtgtactgaatctctggattccagcgtttgctgttttctttctgcagttcccactcgatctccacgctgacctggccggtgctgtactgcgtgataaatgaggcaaactaggcaggagtaaacacccctggaggattagcaggtaccggggtgtttttgatgagaatttgaggaggcgggtgtttgagtccaaatccgcccatcaggggagacgggtgaaagttgccgtccgtgtgaggaattttggcccagatgggaccctgcaggtacacgtcccggttctgccagaccatgccgggcagagccccctggctgttgacagtctgtgtctggggtccggccgtagacgattgcaggttgctggagaccacaccgtattcttctgtagccacgggattggtggttttgatctcctcctcgctggtcattagcacgttttccagcgttgtcttgttggcagcccccgttttgccaaaaaccagcactccgttgatgggaaagaactggccctcgtcgtccttgttggtggccatggctacgcccgggttggttaatgaatttctaccattcagatggtatttagtggccccggtccaggcaaagttactgttgttgttgctgtctatgttttttgacagtctctgctgccgataacagggtccgggcagccagttctttgattgctcggccatggtgttgggcccagcctgatggaactgcagctcccttgtggaccccgtagtgctctgggtccgggccaggtagtacaggtactggtcgatgaggggattcatcagccggtccaggctctggctgtgcgcatagctgctgtggaaaggcacttcctcaaaggtgtagctgaattcaaagttattgcccgttctcagcatctgagaaggaaagtactccaggcagtagaaggaggaacgtcccatagactgactgccgttgtttagagtcagatatccgtactgaggaatcatgaacacgtccgcagggaacggagggaggcagccctggtgcgcagagccgaggacgtacggcagttggtactccgagtccgagaagacctgaatcgtgctggtaaggttattagcgatggtcgtaacgccgtcgttcgtcgtgacctccttgacctggatgttgaacaacttgaaccgcagctttctgggccggaatccccagttgttgttgatgagtcgctgccagtcacgtggtgagaagtggcagtggaatctgttgaagtcaaaatagccccagggggtgctgtagccgaagaagtggttgtcgttggtagccccgctctgacttgatatctgcttgtagaggtggttgttgtaggtgggcagggcccaggtgcgggtgctggtggtgatgactctgtcgcccagccatgtggaatcgcaatgccaatttccggaggcattacccactccgtcggcgccttcgttattgtctgccattggtgcgccaccgcctgcagccattgtaccagatcccagacctgagggcgcggcgggaggttctccgagaggttgggggtcgggcactgactctgagtcgccagtctgcccaaagttgagcttctttttagcgggctgctggcctttcttgccgatgcccgtggaggagtcgggggattctatgggtctcttctttccaggagccgtcttagcgccttcctcaaccagaccgagaggttcgagaacccgcttcttggcctggaagactgctcgcccgaggttgcccccaaaagacgtatcttcttgaagacgctcctgaaactcagcgtcggcgtggttgtacttgaggtacgggttgtccccctgctcgagctgcttgtcgtaggccttgtcgtgctcgagggccgcggcgtctgcctcgttgaccggctctcccttgtcgagtccgttgaagggtccgaggtacttgtagccaggaagcaccagaccccggccgtcgtcctgcttttgctggttggctttgggtttcggggctccaggtttcaagtcccaccactcgcgaatgccctcagagaggttgtcctcgagccaatctggaagataaccatcggcagccatacctggtttaagtcatttattgctcagaaacacagtcatccaggtccacgttgaccagatcgcaggccgagcaagcaatctcgggagcccgccccagcagatgatgaatggcacagagtttccgatacgtcctctttctgacgaccggttgagattctgacacgccggggaaacattctgaacagtctctggtcccgtgcgtgaagcaaatgttgaaattctgattcattctctcgcatgtcttgcagggaaacagcatctgaagcatgcccgcgtgacgagaacatttgttttggtacctgtcggcaaagtccaccggagctccttccgcgtctgacgtcgatggatccgcgactgaggggcaggcccgcttgggctcgcttttatccgcgtcatcgggggcgggcctcttgttggctccaccctttctgacgtagaactcatgcgccacctcggtcacgtgatcctgcgcccagcggaagaactctttgacttcctgctttgtcaccttgccaaagtcctgctccagacggcgggtgagttcaaatttgaacatccggtcttgtaacggctgctggtgctcgaaggtggtgctgttcccgtcaatcacggcgcacatgttggtgttggaagtgacgatcacgggggtgggatcgatctgggcggacgacttgcacttttggtccacgcgcaccttgctgccgccgagaatggccttggcggactccacgaccttggccgtcatcttgccctcctcccaccagatcaccatcttgtcgacgcaatcgttgaagggaaagttctcattggtccagttgacgcagccgtagaaagggcgaattc

SEQ ID NO: 150 - DNA, 2187 bp, Adeno-associated virus
atggctgccgatggttatcttccagattggctcgagggcaacctctctgagggcattcgcgagtggtgggacttgaaacctggagccccgaaacccaaagccaaccagcaaaagcaggacgacggccggggtctggtgcttcctggctacaggtacctcggacccttcaacggactcgacaagggagagccggtcaacgaggcagacgccgcggccctcgagcacgacaaggcctacgacaagcagctcgagcagggggacaacccgtacctcaagtacaaccacgccgacgccgagtttcaggagcgtcttcaagaagatacgtcttttgggggcaacctcgggcgagcagtcttccaggccaagaagcgggttctcgaacctctcggtctggttgaggaaggcgctaagacggctcctggaaagaagagacccatagaatcccccgactcctccacgggcatcggcaagaacggccagccgcccgctaaaaagaagctcaactttgggcagactggcgactcagagtcagtgcccgacccccaacctctcggagaacctcccgccgcgccctcaggtctgggatctggtacaatggctgcaggcggtggcgcaccaatggcagacaataacgaaggcgccgacggagtgggtaatgcctccggaaattggcattgcgattccacatggctgggcgacagagtcatcaccaccagcacccgcacctgggccctgcccacctacaacaaccacctctacaagcagatatcaagtcagagcggggctaccaacgacaaccacttcttcggctacagcaccccctggggctattttgacttcaacagattccactgccacttctcaccacgtgactggcagcgactcatcaacaacaactggggattccggcccagaaagctgcggttcaagttgttcaacatccaggtcaaggaggtcacgacgaacgacggcgttacgaccatcgctaataaccttaccagcacgattcaggtcttctcggactcggagtaccaactgccgtacgtcctcggctctgcgcaccagggctgcctccctccgttccctgcggacgtgttcatgattcctcagtacggatatctgactctaaacaacggcagtcagtctgtgggacgttcctccttctactgcctggagtactttccttctcagatgctgagaacgggcgataactttgaattcagctacacctttgaggaagtgcctttccacagcagctatgcgcacagccagagcctggaccggctgatgaatcccctcatcgaccagtacctgtactacctggcccggacccagagcactacggggtccacaagggagctgcagttccatcaggctgggcccaacaccatggccgagcaatcaaagaactggctgcccggaccctgttatcggcagcagagactgtcaaaaaacatagacagcaacaacaacagtaactttgcctggaccggggccactaaataccatctgaatggtagaaattcattaaccaacccgggcgtagccatggccaccaacaaggacgacgaggaccagttctttcccatcaacggagtgctggtttttggcaaaacgggggctgccaacaagacaacgctggaaaacgtgctaatgaccagcgaggaggagatcaaaaccaccaatcccgtggctacagaagaatacggtgtggtctccagcaacctgcaatcgtctacggccggaccccagacacagactgtcaacagccagggggctctgcccggcatggtctggcagaaccgggacgtgtacctgcagggtcccatctgggccaaaattcctcacacggacggcaactttcacccgtctcccctgatgggcggatttggactcaaacacccgcctcctcaaattctcatcaaaaacaccccggtacctgctaatcctccagaggtgtttactcctgccaagtttgcctcatttatcacgcagtacagcaccggccaggtcagcgtggagatcgagtgggaactgcagaaagaaaacagcaaacgctggaatccagagattcagtacacctcaaattatgccaagtctaataatgtggaatttgctgtcaacaacgaaggggtttatactgagcctcgccccattggcacccgttacctcacccgtaacctgtaa

SEQ ID NO: 151 - protein, 728 aa, Adeno-associated virus; identical to SEQ ID NO: 146

SEQ ID NO: 152 - protein, 728 aa, Adeno-associated virus
MAADGYLPDWLEDNLSEGIREWWDLKPGAPKPKANQQKQDDGRGLVLPGYRYLGPFNGLDKGEPVNEADAAALEHDKAYDKQLEQGDNPYLKYNHADAEFQERLQEDTSFGGNLGRAVFQAKKRVLEPLGLVEEGAKTAPGKKRPIESPDSSTGIGKNGQPPAKKKLNFGQTGDSESVPDPQPLGEPPAAPSGLGSGTMAAGGGAPMADNNEGADGVGNASGNWHCDSTWLGDRVITTSTRTWALPTYNNHLYKQISSQSGATNDNHFFGYSTPWGYFDFNRFHCHFSPRDWQRLINNNWGFRPRKLRFKLFNIQVKEVTTNDGVTTIANNLTSTIQVFSDSEYQLPYVLGSAHQGCLPPFPADVFMIPQYGYLTLNNGSQSVGRSSFYCLEYFPSQMLRTGDNFEFSYTFEEVPFHSSYAHSQSLDRLMNPLIDQYLYYLARTQSTTGSTRELQFHQAGPNTMAEQSKNWLPGPCYRQQRLSKNIDSNNNSNFAWTGATKYHLNGRNSLTNPGVAMATNKDDEDQFFPINGVLVFGKTGAANKTTLENVLMTSEEEIKTTNPVATEEYGVVSSNLQSSTAGPQTQTVNSQGALPGMVWQNRDVYLQGPIWAKIPHTDGNFHPSPLMGGFGLKHPPPQILIKNTPVPANPPEVFTPAKFASFITQYSTGQVSVEIEWELQKENSKRWNPEIQYTSNYAKSNNVEFAVNNEGVYTEPRPIGTRYLTRNL

SEQ ID NO: 153 - protein, 728 aa, Adeno-associated virus; identical to SEQ ID NO: 145

SEQ ID NO: 154 - protein, 728 aa, Adeno-associated virus
MAADGYLPDWLEDNLSEGIREWWDLKPGAPKPKANQQKQDDGRGLVLPGYKYLGPFNGLDKGEPVNEADAAALEHDKAYDKQLEQGDNPYLKYNHADAEFQERLQEDTSFGGNLGRAVFQAKKRVLEPLGLVEEGAKTAPGKKRPIESPDSSTGIGKNGQPPAKKKLNFGQTGDSESVPDPQPLGEPPAAPSGLGSGTMAAGGGAPMADNNEGADGVGNASGNWHCDSTWLGDRVITTSTRTWALPTYNNHLYKQISSQSGATNDNHFFGYSTPWGYFDFNRFHCHFSPRDWQRLINNNWGFRPRKLRFKLFNIQVKEVTTNDGVTTIANNLTSTIQVFSDSEYQLPYVLGSAHQGCLPPFPADVFMIPQYGYLTLNNGSQSVGRSSFYCLEYFPSQMLRTGNNFEFSYTFEEVPFHSSYAHSQSLDRLMNPLIDQYLYYLARTQSTTGSTRELQFHQAGPNTMAEQSKNWLPGPCYRQQRLSKNIDSNNNSNFAWTGATKYHLNGRNSLTNPGVAMATNKDDEDQFFPINGVLVFGKTGAANKTTLENVLMTSEEEIKTTNPVATEEYGVVSSNLQSSTAGPQTQTVNSQGALPGMVWQNRDVYLQGPIWAKIPHTDGNFHPSPLMGGFGLKHPPPQILIKNTPVPANPPEVFTPAKFASFITQYSTGQVSVEIEWELQKENSKRWNPEIQYTSNYAKSNNVEFAVNNEGVYTEPRPIGTRYLTRNL

SEQ ID NO: 155 - protein, 728 aa, Adeno-associated virus
MAADGYLPDWLEDNLSEGIREWWDLKPGAPKPKANQQKQDDGRGLVLPGYKYLGPFNGLDKGEPVNEADAAALEHDKAYDKQLEQGDNPYLKYNHADAEFQERLQEDTSFGGNLGRAVFQAKKRVLEPLGLVEEGAKTAPGKKRPIESPDSSTGIGKKGQQPAKKKLNFGQTGDSESVPDPQPLGEPPAAPSGLGSGTMAAGGGAPMADNNEGADGVGNASGNWHCDSTWLGDRVITTSTRTWALPTYNNHLYKQISSQSGATNDNHFFGYSTPWGYFDFNRFHCHFSPRDWQRLINNNWGFRPRKLRFKLFNIQVKEVTTNDGVTTIANNLTSTIQVFSDSEYQLPYVLGSAHQGCLPPFPADVFMIPQYGYLTLNNGSQSVGRSSFYCLEYFPSQMLRTGNNFEFSYTFEEVPFHSSYAHSQSLDRLMNPLIDQYLYYLARTQSTTGSTRELQFHQAGPNTMAEQSKNWLPGPCYRQQRLSKNIDSNNNSNFAWTGATKYHLNGRNSLTNPGVAMATNKDDEDQFFPINGVLVFGKTGAANKTTLENVLMTSEEEIKTTNPVATEEYGVVSSNLQSSTAGPQTQTVNSQGALPGMVWQNRDVYLQGPIWAKIPHTDGNFHPSPLMGGFGLKHPPPQILIKNTPVPANPPEVFTPAKFASFITQYSTGQVSVEIEWELQKENSKRWNPEIQYTSNYAKSNNVEFAVNNEGVYTEPRPIGTRYLTRNL

SEQ ID NO: 156 - DNA, 2215 bp, Artificial Sequence
  Description of Artificial Sequence: Synthetic polynucleotide
atggctgccgatggttatcttccagattggctcgaggacactctctctgaaggaataagacagtggtggaagctcaaacctggcccaccaccaccaaagcccgcagagcggcataaggacgacagcaggggtcttgtgcttcctgggtacaagtacctcggacccttcaacggactcgacaagggagagccggtcaacgaggcagacgccgcggccctcgagcacgacaaagcctacgaccggcagctcgacagcggagacaacccgtacctcaagtacaaccacgccgacgccgagttccaggagcggctcaaagaagatacgtcttttgggggcaacctcgggcgagcagtcttccaggccaaaaagaggcttcttgaacctcttggtctggttgaggaagcggctaagacggctcctggaaagaagaggcctgtagagcactctcctgtggagccagactcctcctcgggaaccggaaaggcgggccagcagcctgcaagaaaaagattgaattttggtcagactggagacgcagactcagtcccagaccctcaaccaatcggagaacctcccgcagccccctcaggtgtgggatctcttacaatggctgcaggcggtggcgcaccaatggcagacaataacgagggcgccgacggagtgggtaattcctcgggaaattggcattgcgattccacatggatgggcgacagagtcatcaccaccagcacccgaacctgggccctgcccacctacaacaaccacctctacaagcaaatctccaacagcacatctggaggatcttcaaatgacaacgcctacttcggctacagcaccccctgggggtattttgactttaacagattccactgccacttttcaccacgtgactggcagcgactcatcaacaacaactggggattccggcccaagagactcagcttcaagctcttcaacatccaggtcaaggaggtcacgcagaatgaaggcaccaagaccatcgccaataacctcaccagcaccatccaggtgtttacggactcggagtaccagctgccgtacgttctcggctctgcccaccagggctgcctgcctccgttcccggcggacgtgttcatgattccccagtacggctacctaacactcaacaacggtagtcaggccgtgggacgctcctccttctactgcctggaatactttccttcgcagatgctgagaaccggcaacaacttccagtttacttacaccttcgaggacgtgcctttccacagcagctacgcccacagccagagcttggaccggctgatgaatcctctgattgaccagtacctgtactacttgtctcggactcaaacaacaggaggcacgacaaatacgcagactctgggcttcagccaaggtgggcctaatacaatggccaatcaggcaaagaactggctgccaggaccctgttaccgccagcagcgagtatcaaagacatctgcggataacaacaacagtgaatactcgtggactggagctaccaagtaccacctcaatggcagagactctctggtgaatccgggcccggccatggcaagccacaaggacgatgaagaaaagtttttttcctcagagcggggttctcatctttgggaagcaaggctcagagaaaacaaatgtggacattgaaaaggtcatgattacagacgaagaggaaatcaggacaaccaatcccgtggctacggagcagtatggttctgtatctaccaacctccagagaggcaacagacaagcagctaccgcagatgtcaacacacaaggcgttcttccaggcatggtctggcaggacagagatgtgtaccttcaggggcccatctgggcaaagattccacacacggacggacattttcacccctctcccctcatgggtggattcggacttaaacaccctccgcctcagatcctgatcaagaacacgcctgtacctgcggatcctccgaccaccttcaaccagtcaaagctgaactctttcatcacccagtattctactggccaagtcagcgtggagatcgagtgggagctgcagaaggaaaacagcaagcgctggaaccccgagatccagtacacctccaactactacaaatctacaagtgtggactttgctgttaatacagaaggcgtgtactctgaaccccgccccattggcacccgttacctcacccgtaatctgtaa

SEQ ID NO: 157 - protein, 737 aa, Artificial Sequence
  Description of Artificial Sequence: Synthetic polypeptide
MAADGYLPDWLEDTLSEGIRQWWKLKPGPPPPKPAERHKDDSRGLVLPGYKYLGPFNGLDKGEPVNEADAAALEHDKAYDRQLDSGDNPYLKYNHADAEFQERLKEDTSFGGNLGRAVFQAKKRLLEPLGLVEEAAKTAPGKKRPVEHSPVEPDSSSGTGKAGQQPARKRLNFGQTGDADSVPDPQPIGEPPAAPSGVGSLTMAAGGGAPMADNNEGADGVGNSSGNWHCDSTWMGDRVITTSTRTWALPTYNNHLYKQISNSTSGGSSNDNAYFGYSTPWGYFDFNRFHCHFSPRDWQRLINNNWGFRPKRLSFKLFNIQVKEVTQNEGTKTIANNLTSTIQVFTDSEYQLPYVLGSAHQGCLPPFPADVFMIPQYGYLTLNNGSQAVGRSSFYCLEYFPSQMLKTGNNFQFTYTFEDVPFHSSYAHSQSLDRLMNPLIDQYLYYLSRTQTTGGTTNTQTLGFSQGGPNTMANQAKNWLPGPCYRQQRVSKTSADNNNSEYSWTGATKYHLNGRDSLVNPGPAMASHKDDEEKFFPQSGVLIFGKQGSEKTNVDIEKVMITDEEEIRTTNPVATEQYGSVSTNLQRGNRQAATADVNTQGVLPGMVWQDRDVYLQGPIWAKIPHTDGHFHPSPLMGGFGLKHPPPQILIKNTPVPADPPTTFNQSKLNSFITQYSTGQVSVEIEWELQKENSKRWNPEIQYTSNYYKSTSVDFAVNTEGVYSEPRPIGTRYLTRNL

SEQ ID NO: 158 - protein, 737 aa, Artificial Sequence
  Description of Artificial Sequence: Synthetic polypeptide
MAADGYLPDWLEDTLSEGIRQWWKLKPGPPPPKPAERHKDDSRGLVLPGYKYLGPFNGLDKGEPVNEADAAALEHDKAYDRQLDSGDNPYLKYNHADAEFQERLKEDTSFGGNLGRAVFQAKKRLLEPLGLVEEAAKTAPGKKRPVEHSPVEPDSSSGTGKAGQQPARKRLNFGQTGDADSVPDPQPIGEPPAAPSGVGSLTMAAGGGAPMADNNEGADGVGNSSGNWHCDSTWMGDRVITTSTRTWALPTYNNHLYKQISNSTSGGSSNDNAYFGYSTPWGYFDFNRFHCHFSPRDWQRLINNNWGFRPKRLSFKLFNIQVKEVTQNEGTKTIANNLTSTIQVFTDSEYQLPYVLGSAHQGCLPPFPADVFMIPQYGYLTLNNGSQAVGRSSFYCLEYFPSQMLKTGNNFQFTYTFEDVPFHSSYAHSQSLDRLMNPLIDQYLYYLSRTQTTGGTTNTQTLGFSQGGPNTMANQAKNWLPGPCYRQQRVSKTSADNNNSEYSWTGATKYHLNGRDSLVNPGPAMASHKDDEEKFFPQSGVLIFGKQGSEKTNVDIEKVMITDEEEIRTTNPVATEQYGSVSTNLQQGNTQAATADVNTQGVLPGMVWQDRDVYLQGPIWAKIPHTDGHFHPSPLMGGFGLKHPPPQILIKNTPVPADPPTTFNQSKLNSFITQYSTGQVSVEIEWELQKENSKRWNPEIQYTSNYYKSTSVDFAVNTEGVYSEPRPIGTRYLTRNL

SEQ ID NO: 159 - protein, 737 aa, Artificial Sequence
  Description of Artificial Sequence: Synthetic polypeptide
MAADGYLPDWLEDTLSEGIRQWWKLKPGPPPPKPAERHKDDSRGLVLPGYKYLGPFNGLDKGEPVNEADAAALEHDKAYDRQLDSGDNPYLKYNHADAEFQERLKEDTSFGGNLGRAVFQAKKRLLEPLGLVEEAAKTAPGKKRPVEHSPVEPDSSSGTGKAGQQPARKRLNFGQTGDADSVPDPQPIGEPPAAPSGVGSLTMAAGGGAPMADNNEGADGVGNSSGNWHCDSTWMGDRVITTSTRTWALPTYNNHLYKQISNSTSGGSSNDNAYFGYSTPWGYFDFNRFHCHFSPRDWQRLINNNWGFRPKRLSFKLFNIQVKEVTQNEGTKTIANNLTSTIQVFTDSEYQLPYVLGSAHQGCLPPFPADVFMIPQYGYLTLNNGSQAVGRSSFYCLEYFPSQMLRTGNNFQFTYTFEDVPFHSSYAHSQSLDRLMNPLIDQYLYYLSRTQTTGGTTNTQTLGFSQGGPNTMANQAKNWLPGPCYRQQRVSKTSADNNNSEYSWTGATKYHLNGRDSLVNPGPAMASHKDDEEKFFPQSGVLIFGKQGSEKTNVDIEKVMITDEEEIRTTNPVATEQYGSVSTNLQQGNTQAATADVNTQGVLPGMVWQDRDVYLQGPIWAKIPHTDGHFHPSPLMGGFGLKHPPPQILIKNTPVPADPPTTFNQSKLNSFITQYSTGQVSVEIEWELQKENSKRWNPEIQYTSNYYKSTSVDFAVNTEGVYSEPRPIGTRYLTRNL

SEQ ID NO: 160 - protein, 729 aa, Adeno-associated virus
MAADGYLPDWLEDNLSEGIREWWDLKPGAPKPKANQQKQDDGRGLVLPGYKYLGPFNGLDKGEPVNAADAAALEHDKAYDQQLKAGDNPYLRYNHADAEFQERLQEDTSFGGNLGRAVFQAKKRVLEPLGLVEEGAKTAPGKKRPIDSPDSSTGIGKKGQQPAKKKLNFGQTGDSESVPDPQPLGEPPAAPSSVGSGTMAAGGGAPTADNNEGADGVGNASGNWHCDSTWLGDRVITTSTRTWALPTYNNHLYKQISSSSSGATNDNHYFGYSTPWGYFDFNRFHCHFSPRDWQRLINNNWGFRPKKLRFKLFNIQVKEVTTNDGVTTIANNLTSTVQVFSDSEYQLPYVLGSAHQGCLPPFPADVFMIPQYGYLTLNNGSQSVGRSSFYCLEYFPSQMLRTGNNFEFSYSFEDVPFHSSYAHSQSLDRLMNPLIDQYLYYLARTQSTTGSTRELQFHQAGPNTMAEQSKNWLPGPCYRQQRLSKNLDFNNNSNFAWTAATKYHLNGRNSLTNPGIPMATNKDDEDQFFPINGVLVFGKTGAANKTTLENVLMTSEEEIKTTNPVATEEYGVVSSNLQSSTAGPQSQTINSQGALPGMVWQNRDVYLQGPIWAKIPHTDGNFHPSPLMGGFGLEHPPPQILIKNTPVPANPPEVFTPAKFASFITQYSTGQVSVEIEWELQKENSKRWNPEIQYTSNYAKSNNVEFAVNPDGVYTEPRPIGTRYLTRNL

SEQ ID NO: 161 - DNA, 3075 bp, Adeno-associated virus
tgagaactttcctttcaacgattgcgtcggacaagatggtgatctggtgggaggaggggaagatgaccgccaaggtcgtggagtcggccaaagccattcttggaggaagcaaggtgcgtgtggaccagaaatgcaagtcctcggcccagatagacccgactcccgtgatcgtcacctccaacaccaacatgtgcgccgtgattgacgggaactcaacgaccttcgagcaccagcagccgttgcaagaccggatgttcaaatttgaacttacccgccgtctggatcatgactttggaaaggtcaccaagcaggaagtgaaagactttttccggtgggcaaaggatcacgtggttgaggtggagcatgaattctacgtcaaaaagggtggagctaagaaaagacccgcccccagtgacgcagatataagtgagcccaaacgggcgcgcgagtcagttgcgcagccatcaacgtcagacgcggaagcttcgatcaactacgcggacaggtaccaaaaacaaatgttctcgtcacgtgggcatgaatctgatgctgtttccctgcagacaatgcgagagaatgaatcagaattcaaatatctgcttcactcacggacagaaagactgtttagagtgctttcccgtgtcagaatctcaacccgtttctgtcgtcaaaaaggcgtatcagaaactgtgctacattcatcatatcatgggaaaggtgccagacgcttgcactgcctgcgatctggtcaatgtggatttggatgactgcatctctgaacaataaatgatttaaatcaggtatggctgccgatggttatcctccagattggctcgaggacactctctctgaagggataagacagtggtggaagctcaaacctggcccaccaccaccaaagcccgcagagcggcataaggacgacagcaggggtcttgtgcttcctgggtacaagtacctcggacccttcaacggactcgacaagggggagccggtcaacgaggcagacgccgcggccctcgagcacgacaaggcctacgaccggcagctcgacagcggagacaacccgtacctcaagtacaaccacgccgacgcagagtttcaggagcgccttaaagaagatacgtcttttgggggcaacctcggacgagcagtcttccaggcgaaaaagagggttcttgaacctctgggcctggttgaggaacctgttaagacggctccgggaaaaaagaggccggtagagcactctcctgtggagccagactcctcctcgggaaccggaaaagcgggccagcggcctgcaagaaaaagattaaattttggtcagactggagacgcagactccgtacctgacccccagcctctcggacagccaccagcagccccctctggtctgggatctactacaatggctacaggcagtggcgcaccaatggcagacaataacgagggtgccgatggagtgggtaattcctcaggaaattggcattgcgattcccaatggctgggcgacagagtcatcaccaccagcacccgaacctgggccctgcccacatacaacaaccacctctacaagcaaatctccagccaatcaggagccagcaacgacaaccactactttggctacagcaccccctgggggtattttgacttcaacagattccactgccacttttcaccacgtgactggcaaagactcatcaacaacaactggggattccggcccaaaagactcaacttcaagctctttaatattcaagtcaaagaggtcacgcagaatgacggtacgacgacgattgccaataaccttaccagcacggttcaggtgtttactgactcggagtaccagctcccgtacgtcctgggctcggcgcatcaaggatgcctcccgccgtttccagcggacgtcttcatggtcccacagtatggatacctcaccctgaacaacgggagtcaggcggtaggacgctcttccttttactgcctggagtactttccttctcagatgctgcgtactggaaacaactttcagttcagctacacttttgaagacgtgcctttccacagcagctacgctcacagccagagtctggatcggctgatgaatcctctgatcgaccagtacctgtattatctgaacaagacacaaacaaatagtggaactcttcagcagtctcggctactgtttagccaagctggaccaaccaacatgtctcttcaagctaaaaactggctgcctggaccttgctacagacagcagcgtctgtcaaaacaggcaaacgacaacaacaacagcaactttccctggactgcagctacaaagtatcatctaaatggccgggactcgttggttaatccaggaccagctatggccagtcacaaggatgacgaagaaaagtttttccccatgcatggaaccctgatatttggtaaacaaggaacaaatgccaacgacgcggatttggaaaatgtcatgattacagatgaagaagaaatcagggccaccaatcccgtggctacggagcagtacgggactgtgtcaaataatttgcaaaactcaaacactggtccaactactggaactgtcaatcgccaaggagcgttacctggtatggtgtggcaggatcgagacgtgtacctgcagggacccatttgggccaagattcctcacaccgatggacactttcatccttctccactgatgggaggttttggactcaaacacccgcctcctcagatcatgatcaaaaacactcccgttccagccaatcctcccacaaacttcagttctgccaagtttgcttctttcatcacacagtattccacgggacaggtcagcgtggagatcgagtgggagctgcagaaggagaacagcaaacgctggaatcccgaaattcagtacacttccaactacaacaagtctgttaatgtggactttactgtggacactaatggtgtgtattcagagcctcgccccattggcaccagatacctgactcgtaatctgtaattgcttgttaatcaataaaccgtttaattcgtttcagttgaactttggtctctgcgaagggcgaa

SEQ ID NO: 162 - DNA, 3142 bp, Adeno-associated virus
aaaacgacgggccagtgattgtaatacgactcactatagggcgaaattgaaattagcggccgcgaattcgcctttcgcagagaccaaagttcaactgaaacgaattaaacggtttattgattaacaagcaattacagattacgagtcaggtatctggtgccaatggggcgaggctctgaatacacaccattagtgtccacagtaaagtccacattaacagacttgttgtagttggaagtgtactgaatttcgggattccagcgtttgctgttctccttctgcagctcccactcgatctccacgctgacctgtcccgtggaatactgtgtgatgaaagaagcaaacttggcagaactgaagtttgtgggaggattggctggaacgggagtgtttttgatcatgatctgaggaggcgggtgtttgagtccaaaacctcccatcagtggagaaggatgaaagtgtccatcggtgtgaggaatcttggcccaaatgggtccctgcaggtacacgtctcgatcctgccacaccataccaggtaacgctccttggtgattgacagttccagtagttggaccagtgtttgagttttgcaaattatttgacacagtcccgtactgctccgtagccacgggattggtggccctgatttcttcttcatctgtaatcatgacattttccaaatccgcgtcgttggcatttgttccttgtttaccaaatatcagggttccatgcatggggaaaaacttttcttcgtcatccttgtgactggccatagctggtcctggattaaccaacgagtcccggccatttagatgatactttgtagctgcagtccagggaaagttgctgttgttgttgtcgtttgcctgttttgacagacgctgctgtctgtagcaaggtccaggcagccagtttttagcttgaagagacatgttggttggtccagcttggctaaacagtagccgagactgctgaagagttccactatttgtttgtgtcttgttcagataatacaggtactggtcgatcagaggattcatcagccgatccagactctggctgtgagcgtagctgctgtggaaaggcacgtcttcaaaagtgtagctgaactgaaagttgtttccagtacgcagcatctgagaaggaaagtactccaggcagtaaaaggaagagcgtcctaccgcctgactcccgttgttcagggtgaggtatccatactgtgggaccatgaagacgtccgctggaaacggcgggaggcatccttgatgcgccgagcccaggacgtacgggagctggtactccgagtcagtaaacacctgaaccgtgctggtaaggttattggcaatcgtcgtcgtaccgtcattctgcgtgacctctttgacttgaatattaaagagcttgaagttgagtcttttgggccggaatccccggttgttgttgacgagtctttgccagtcacgtggtgaaaagtggcagtggaatctgttgaagtcaaaatacccccagggggtgctgtagccaaagtagtggttgtcgttgctggctcctgattggctggagatttgcttgtagaggtggttgttgtatgtgggcagggcccaggttcgggtgctggtggtgatgactctgtcgcccagccattgggaatcgcaatgccaatttcctgaggaattacccactccatcggcaccctcgttattgtctgccattggtgcgccactgcctgtagccattgtagtagatcccagaccagagggggctgctggtggctgtccgagaggctgggggtcaggtacggagtctgcgtctccagtctgaccaaaatttaatctttttcttgcaggctgctggcccgcttttccggttcccgaggaggagtctggctccacaggagagtgctctaccggcctcttttttcccggagccgtcttaacaggctcctcaaccaggcccagaggttcaagaaccctctttttcgcctggaagactgctcgtccgaggttgcccccaaaagacgtatcttctttaaggcgctcctgaaactctgcgtcggcgtggttgtacttgaggtacgggttgtctccgctgtcgagctgccggtcgtaggccttgtcgtgctcgagggccgcggcgtctgcctcgttgaccggctcccccttgtcgagtccgttgaagggtccgaggtacttgtacccaggaagcacaagacccctgctgtcgtccttatgccgctctgcgggctttggtggtggtgggccaggtttgagcttccaccactgtcttattccttcagagagagtgtcctcgagccaatctggaagataaccatcggcagccatacctgatttaaatcatttattgttcagagatgcagtcatccaaatccacattgaccagatcgcaggcagtgcaagcgtctggcacctttcccatgatatgatgaatgtagcacagtttctgatacgcctttttgacgacagaaacgggttgagattctgacacgggaaagcactctaaacagtctttctgtccgtgagtgaagcagatatttgaattctgattcattctctcgcattgtctgcagggaaacagcatcagattcatgcccacgtgacgagaacatttgttttggtacctgtccgcgtagttgatcgaagcttccgcgtctgacgtcgatggctgcgcaactgactcgcgcgcccgtttgggctcacttatatctgcgtcactgggggcgggtcttttcttagctccaccctttttgacgtagaattcatgctccacctcaaccacgtgatcctttgcccaccggaaaaagtctttcacttcctgcttggtgacctttccaaagtcatgatccagacggcgggtaagttcaaatttgaacatccggtcttgcaacggctgctggtgctcgaaggtcgttgagttcccgtcaatcacggcgcacatgttggtgttggaggtgacgatcacgggagtcgggtctatctgggccgaggacttgcatttctggtccacacgcaccttgcttcctccaagaatggctttggccgactccacgaccttggcggtcatcttcccctcctcccaccagatcaccatcttgtcgacgcaatggtaaaaggaaagttctcattgg

SEQ ID NO: 163 - protein, 735 aa, Adeno-associated virus 2
MAADGYLPDWLEDTLSEGIRQWWKLKPGPPPPKPAERHKDDSRGLVLPGYKYLGPFNGLDKGEPVNEADAAALEHDKAYDRQLDSGDNPYLKYNHADAEFQERLKEDTSFGGNLGRAVFQAKKRVLEPLGLVEEPVKTAPGKKRPVEHSPVEPDSSSGTGKAGQQPARKRLNFGQTGDADSVPDPQPLGEPPATPAAVGPTTMASGGGAPMADNNEGADGVGNASGNWHCDSTWLGDRVITTSTRTWALPTYNNHLYKQISSASTGASNDNHYFGYSTPWGYFDFNRFHCHFSPRDWQRLINNNWGFRPKRLNFKLFNIQVKEVTQNDGTTTIANNLTSTVQVFTDSEYQLPYVLGSAHQGCLPPFPADVFMIPQYGYLTLNNGSQAVGRSSFYCLEYFPSQMLRTGNNFTFSYTFEDVPFHSSYAHSQSLDRLMNPLIDQYLYYLNRTQNQSGSAQDKALLFSRGSPAGMSVQPKNWLPGPCYRQQRVSKTKTDNNNSNFTWTGASKYNLNGRESIINPGTAMASHKDDKDKFFPMSGVMIFGKESAGASNTALDNVMITDEEEIKATNPVATERFGTVAVNFQSSSTDPATGDVHVMGALPGMVWQDRDVYLQGPIWAKIPHTDGHFHPSPLMGGFGLKHPPPQILIKNTPVPANPPAEFSATKFASFITQYSTGQVSVEIEWELQKENSKRWNPEVQYTSNYAKSANVDFTVDNNGLYTEPRPIGTRYLTRP

SEQ ID NO: 164 - protein, 740 aa, Adeno-associated virus 2
MAADGYLPDWLEDTLSEGIRQWWKLKPGPPPPKPAERHKDDSRGLVLPGYKYLGPFNGLDKGEPVNAADAAALEHDKAYDRQLDSGDNPYLKYNHADAEFQERLKEDTSFGGNLGRAVFQAKKRVLEPLGLVEEPVKTAPGKKRPVEHSPVEPDSSSGTGKAGQQPARKRLNFGQTGDADSVPDPQPLGQPPAAPSGLGTNTMATGSGAPMADNNEGADGVGNSSGNWHCDSTWMGDRVITTSTRTWALPTYNNHLYKQISSQSGASNDNHYFGYSTPWGYFDFNRFHCHFSPRDWQRLINNNWGFRPKRLNFKLFNIQVKEVTQNDGTTTIANNLTSTVQVFTDSEYQLPYVLGSAHQGCLPPFPADVFMVPQYGYLTLNNGSQAVGRSSFYCLEYFPSQMLRTGNNFTFSYTFEDVPFHSSYAHSQSLDRLMNPLIDQYLYYLSRTNTPSGTTTQSGLQFSQAGASDIRDQSRNWLPGPCYRQQRVSKTSADNNNSEYSWTGATKYHLNGRDSLVNPGPAMASHKDDEEKFFPQSGVLIFGKQGSEKTNVDIEKVMITDEEEIRTTNPVATEQYGSVSTNLQRGNRQAATADVNTQGVLPGMVWQDRDVYLQGPIWAKIPHTDGHFHPSPLMGGFGLKHPPPQILIKNTPVPANPSTTFSAAKFASFITQYSTGQVSVEIEWELQKENSKRWNPEIQYTSNYNKSVNVDFTVDTNGVYSEPRPIGTRYLTRNLLLAAA

SEQ ID NO: 165 - protein, 734 aa, Adeno-associated virus 2
MAADGYLPDWLEDTLSEGIRQWWKLKPGPPPPKPAERHKDDSRGLVLPGYKYLGPFNGLDKGEPVNEADAAALEHDKAYDRQLDSGDNPYLKYNHADAEFQERLKEDTSFGGNLGRAVFQAKKRVLEPLGLVEEPVKTAPGKKRPVEHSPVEPDSSSGTGKAGQQPARKRLNFGQTGDADSVPDPQPLGQPPAAPSGLGTNTMATGSGAPMADNNEGADGVGNSSGNWHCDSTWMGDRVITTSTRTWALPTYNNHLYKQISSQSGASNDNHYFGYSTPWGYFDFNRFHCHFSPRDWQRLINNNWGFRPKRLNFKLFNIQVKEVTQNDGTTTIANNLTSTVQVFTDSEYQLPYVLGSAHQGCLPPFPADVFMVPQYGYLTLNNGSQAVGRSSFYCLEYFPSQMLRTGNNFTFSYTFEDVPFHSSYAHSQSLDRLMNPLIDQYLYYLSRTNTPSGTTTQSGLQFSQAGASDIRDQSRNWLPGPCYRQQRVSKTSADNNNSEYSWTGATMYHLNGRDSLVNPGPAMASHKDDEEKFFPQSGVLIFGKQGSEKTNVDIEKVMITDEEEIRTTNPVATEQYGSVSTNLQRGNRQAATADVNTQGVLPGMVWQDRDVYLQGPIWAKIPHTDGHFHPSPLMGGFGLKHPPPQILIKNTPVPANPSTTFSAAKFASFITQYSTGQVSVEIEWELQKENSKRWNPEIQYTSNYNKSINVDFTVDTNGVYSEPRPIGTRYLTRN

SEQ ID NO: 166 - protein, 734 aa, Adeno-associated virus 2
MAADGYLPDWLEDTLSEGIRQWWKLKPGPPPPKPAERHKDDSRGLVLPGYKYLGPFNGLDKGEPVNEADAAALEHDKAYDRQLDSGDNPYLKYNHADAEFQERLKEDTSFGGNLGRAVFQAKKRVLEPLGLVEEPVKTAPGKKRPVEHSPVEPDSSSGTGKAGQQPARKRLNFGQTGDADSVPDPQPLGQPPAAPSGLGTNTMATGSGAPMADNNEGADGVGNSSGNWHCDSTWMGDRVITTSTRTWALPTYNNHLYKQISSQSGASNDNHYFGYSTPWGYFDFNRFHCHFSPRDWQRLINNNWGFRPKRLNFKLFNIQVKEVTQNDGTTTIANNLTSTVQVFTDSEYQLPYVLGSAHQGCLPPFPADVFMVPQYGYLTLNNGSQAVGRSSFYCLEYFPSQMLRTGNNFTFSYTFEDVPFHSSYAHSQSLDRLMNPLIDQYLYYLSRTNTPSGTTTQSGLQFSQAGASDIRDQSRNWLPGPCYRQQRVSKTSADNNNSEYSWTGATKYHLNGRDSLVNPGPAMASHKDDEEKFFPQSGVLIFGKQGSEKTNVDIEKVMITDEEEIRTTNPVATEQYGSVSTNLQRGNRQAATADVNTQGVLPGMVWQDRDVYLQGPIWAKIPHTDGHFHPSPLMGGFGLKHPPPQILIKNTPVPANPSTTFSEAKFASFITQYSTGQVSVEIEWELQKENSKRWNPEIQYTSNYNKSVNVDFTVDTNGVYSEPRPIGTRYLTRN

SEQ ID NO: 167 - protein, 739 aa, Adeno-associated virus 2
MAADGYLPDWLEDTLSEGIRQWWKLKPGPPPPKPAERHKDDSRGLVLPGYKYLGPFNGLDKGEPVNEADAAALEHDKAYDRQLDSGDNPYLKYNHADAEFQERLKEDTSFGGNLGRAVFQAKKRVLEPLGLVEEPVKTAPGKKRPVEHSPVEPDSSSGTGKAGQQPARKRLNFGQTGDADSVPDPQPLGQPPAAPSGLGTNTMATGSGAPMADNNEGADGVGNSSGNWHCDSTWMGDRVITTSTRTWALPTYNNHLYKQISSQSGASNDNHYFGYSTPWGYFDFNRFHCHFSPRDWQRLINNNWGFRPKRLNFKLFNIQVKEVTQNDGTTTIANNLTSTVQVFTDSEYQLPYVLGSAHQGCLPPFPADVFMVPQYGYLTLNNGSQAVGRSSFYCLEYFPSQMLRTGNNFTFSYTFEDVPFHSSYAHSQSLDRLMNPLIDQYLYYLSRTNTPSGTTTQSGLQFSQAGASDIRDQSRNWLPGPCYRQQRVSKTSADNNNSEYSWTGATKYHLNGRDSLVNPGPAMASHKDDEEKFFPQSGVLIFGKQGSEKTNVDIEKVMITDEEEIRTTNPVATEQYGSVSTNLQRGNRQAATADVNTQGVLPGMVWQDRDVYLQGPIWAKIPHTDGHFHPSPLMGGFGLKHPPPQILIKNTPVPANPSTTFSAAKFASFITQYSTGQVSVEIEWELQKENSKRWNPEIQYTSNYNKSVNVDFTVDTNGVYSEPRPIGTRYLTRNLLLAA

SEQ ID NO: 168 - protein, 725 aa, Adeno-associated virus 2
MAADGYLPDWLEDTLSEGIRQWWKLKPGPPPPKPAERHKDDSRGLVLPGYKYLGPFNGLDKGEPVNEADAAALEHDKAYDRQLDSGDNPYLKYNHADAEFQERLKEDTSFGGNLGRAVFQAKKRVLEPLGLVEEPVKTAPGKKRPVEHSPVEPDSSSGTGKAGQQPARKRLNFGQTGDADSVPDPQPLGQPPAAPSGLGTNTMATGSGAPMADNNEGADGVGNSSGNWHCDSTWMGDRVITTSTRTWALPTYNNHLYKQISSQSGASNDNHYFGYSTPWGYFDFNRFHCHFSPRDWQRLINNNWGFRPKRLNFKLFNIQVKEVTQNDGTTTIANNLTSTVQVFTDSEYQLPYVLGSAHQGCLPPFPADVFMVPQYGYLTLNNGSQAVGRSSFYCLEYFPSQMLRTGNNFTFSYTFEDVPFHSSYAHSQSLDRLMNPLIDQYLYYLSRTNTPSGTTTQSGLQFSQAGASDIRDQSRNWLPGPCYRQQRVSKTSADNNNSEYSWTGATKYHLNGRDSLVNPGPAMASHKDDEEKFFPQSGVLIFGKQGSEKTNVDIEKVMITDEEEIRTTNPVATEQYGSVSTNLQRGNRQAATADVNTQGVLPGMVWQDRDVYLQGPIWAKIPHTDGHFHPSPLMGGFGLKHPPPQILIKNTPVPANPSTTFSAAKFASFITQYSTGQVSVEIEWELQKENSKRWNPEIQYTSNYNKSVNVDFTVDTNGVYSEPRP

SEQ ID NO: 169 - protein, 707 aa, Adeno-associated virus 2
MAADGYLPDWLEDTLSEGIRQWWKLKPGPPPPKPAERHKDDSRGLVLPGYKYLGPFNGLDKGEPVNEADAAALEHDKAYDRQLDSGDNPYLKYNHADAEFQERLKEDTSFGGNLGRAVFQAKKRVLEPLGLVEEPVKTAPGKKRPVEHSPVEPDSSSGTGKAGQQPARKRLNFGQTGDADSVPDPQPLGQPPAAPSGLGTNTMATGSGAPMADNNEGADGVGNSSGNWHCDSTWMGDRVITTSTRTWALPTYNNHLYKQISSQSGASNDNHYFGYSTPWGYFDFNRFHCHFSPRDWQRLINNNWGFRPKRLNFKLFNIQVKEVTQNDGTTTIANNLTSTVQVFTDSEYQLPYVLGSAHQGCLPPFPADVFMVPQYGYLTLNNGSQAVGRSSFYCLEYFPSQMLRTGNNFTFSYTFEDVPFHSSYAHSQSLDRLMNPLIDQYLYYLSRTNTPSGTTTQSGLQFSQAGASDIRDQSRNWLPGPCYRQQRVSKTSADNNNSEYSWTGATKYHLNGRDSLVNPGPAMASHKDDEEKFFPQSGVLIFGKQGSEKTNVDIEKVMITDEEEIRTTNPVATEQYGSCIYQPPERQQTSSYRRCQHTRRSSRHGLAGQRCVPSGAHLGKDSTHGRTFSPLSPHGWIRTTPSSTDSHQEHPGTCESFDHLQCGKVCFLHHTVLHGTGQRGDRVRAAEGKQQTLESRNSVHFQLQQVC

SEQ ID NO: 170 - protein, 739 aa, Adeno-associated virus 2; identical to SEQ ID NO: 167

SEQ ID NO: 171 - protein, 737 aa, Adeno-associated virus 2
MASDGYLPDWLEDNLSEGIREWWDLKPGAPKPKANQQKQDDGRGLVLPGYKYLGPFNGLDKGEPVNAADAAALEHDKAYDQQLKAGDNPYLRYNHADAEFQERLQEDTSFGGNLGRAVFQAKKRVLEPFGLVEEGAKTAPGKKRPVEQSPQEPDSSSGIGKTGQQPAKKRLNFGQTGDSESVPDPQPLGEPPATPAAVGPTTMASGGGAPMADNNEGADGVGNASGNWHCDSTWLGDRVITTSTRTWALPTYNNHLYKQISSASTGASNDNHYFGYSTPWGYFDFNRFHCHFSPRDWQRLINNNWGFRPKRLNFKLFNIQVKEVTTNDGTTTIANNLTSTVQVFTDSEYQLPYVLGSAHQGCLPPFPADVFMVPQYGYLTLNNGSQAVGRSSFYCLEYFPSQMLRTGNNFTFSYTFEDVPFHSSYAHSQSLDRLMNPLIDQYLYYLSRTNTPSGTTTQSGLQFSQAGASDIRDQSRNWLPGPCYRQQRVSKTSADNNNSEYSWTGATKYHLNGRDSLVNPGPAMASHKDDEEKFFPQSGVLIFGKQGSEKTNVDIEKVMITDEEEIRTTNPVATEQYGSVSTNLQRGNRQAATADVNTQGVLPGMVWQDRDVYLQGPIWAKIPHTDGHFHPSPLMGGFGLKHHPPQILIKNTPVPANPSTTFSAAKFASFITQYSTGQVSVEIEWELQKENSKRWNPEIQYTSNYNKSVNVDFTVDTNGVYSEPRPIGTRYLTRNLL

SEQ ID NO: 172 - protein, 741 aa, Adeno-associated virus 2
MAADGYLPDWLEDTLSEGIREWWALKPGAPKPKANQQKQDDGRGLVLPGYKYLGPFNGLDKGEPVNEADAAALEHDKAYDQQLQAGDNPYLRYNHADAEFQERLQEDTSFGGNLGRAVFQAKKRVLEPLGLVEEPVKTAPGKKRPVEHSPVEPDSSSGTGKSGQQPARKRLNFGQTGDADSVPDPQPLGQPPAAPSGLGTNTMATGSGAPMADNNEGADGVGNSSGNWHCDSTWMGDRVITTSTRTWALPTYNNHLYKQISSQSGASNDNHYFGYSTPWGYFDFNRFHCHFSPRDWQRLINNNWGFRPKRLNFKLFNIQVKEVTQNDGTTTIANNLTSTVQVFTDSEYQLPYVLGSAHQGCLPPFPADVFMVPQYGYLTLNNGSQAVGRSSFYCLEYFPSQMLRTGNNFTFSYTFEDVPFHSSYAHSQSLDRLMNPLIDQYLYYLSRTNTPSGTTTQSGLQFSQAGASDIRDQSRNWLPGPCYRQQRVSKTSADNNNSEYSWTGATKYHLNGRDSLVNPGPAMASHKDDEEKFFPQSGVLIFGKQGSEKTNVDIEKVMITDEEEIRTTNPVATEQYGSVSTNLQRGNLANHNNTTNARQAATADVNTQGVLPGMVWQDRDVYLQGPIWAKIPHTDGHFHPSPLMGGFGLKHPPPQILIKNTPVPANPSTTFSAAKFASFITQYSTGQVSVEIEWELQKENSKRWNPEIQYTSNYNKSINVDFTVDTNGVYSEPRPIGTRYL

SEQ ID NO: 173 - protein, 730 aa, Adeno-associated virus 2
MASDGYLPDWLEDNLSEGIREWWDLKPGAPKPKANQQKQDDGRGLVLPGYKYLGPFNGLDKGEPVNAADAAALEHDKAYDQQLKAGDNPYLRYNHADAEFQERLQEDTSFGGNLGRAVFQAKKRVLEPFGLVEEGAKTAPGKKRPVEQSPQEPDSSSGIGKTGQQPAKKRLNFGQTGDSESVPDPQPLGEPPATPAAVGPTTMASGGGAPMADNNEGADGVGNASGNWHCDSTWLGDRVITTSTRTWALPTYNNHLYKQISSASTGASNDNHYFGYSTPWGYFDFNRFHCHFSPRDWQRLINNNWGFRPKRLNFKLFNIQVKEVTTNDGVTTIANNLTSTVQVFSDSEYQLPYVLGSAHQGCLPPFPADVFMIPQYGYLTLNNGSQAVGRSSFYCLEYFPSQMLRTGNNFTFSYTFEDVPFHSSYAHSQSLDRLMNPLIDQYLYYLNRTQNQSGSAQNNDLLFSRGSPAGMSVQPKNWLPGPCYRQQRVSKTKTDNNNSNFTWTGASKYNLNGRESIINPGTAMASHKDDKDKFFPMSGVMIFGKESAGASNTALDNVMITDEEEIKATNPVATERFGTVAVNLQSSSTDPATGDVHVMGALPGMVWQDRDVYLQGPIWAKIPHTDGHFHPSPLMGGFGLKNPPPQILIKNTPVPANPPAEFSATKFASFITQYSTGQVSVEIEWELQKENSKRWNPEVQYTSNYAKSANVDFTVDNNGLYTEPRPIGTR

SEQ ID NO: 174 - protein, 735 aa, Adeno-associated virus 2
  misc_feature (239)..(239): Xaa can be any naturally occurring amino acid
MASDGYLPDWLEDNLSEGIREWWDLKPGAPKPKANQQKQDDGRGLVLPGYKYLGPFNGLDKGEPVNAADAAALEHDKAYDQQLKAGDNPYLRYNHADAEFQERLQEDTSFGGNLGRAVFQAKKRVLEPFGLVEEGAKTAPGKKRPVEQSPQEPDSSSGIGKTGQQPAKKRLNFGQTGDSESVPDPQPLGEPPATPAAVGPTTMASGGGAPMADNNEGADGVGNASGNWHCDSTWLGDRXITTSTRTWALPTYNNHLYKQISSASTGASNDNHYFGYSTPWGYFDFNRFHCHFSPRDWQRLINNNWGFRPKRLNFKLFNIQVKEVTTNDGVTTIANNLTSTVQVFSDSEYQLPYVLGSAHQGCLPPFPADVFMIPQYGYLTLNNGSQAVGRSSFYCLEYFPSQMLRTGNNFTFSYTFEDVPFHSSYAHSQSLDRLMNPLIDQYLYYLNRTQNQSGSAQNNDLLFSRGSPAGMSVQPKNWLPGPCYRQQRVSKTKTDNNNSNFTWTGASKYNLNGRESIINPGTAMASHKDDKDKFFPMSGVMIFGKESAGASNTALDNVMITDEEEIKATNPVATERFGTVAVNLQSSSTDPATGDVHVMGALPGMVWQDRDVYLQGPIWAKIPHTDGHFHPSPLMGGFGLKNPPPQILIKNTPVPANPPAEFSATKFASFITQYSTGQVSVEIEWELQKENSKRWNPEVQYTSNYAKSANVDFTVDNNGLYTEPRPIGTRYLTRP

SEQ ID NO: 175 - protein, 733 aa, Adeno-associated virus 2
MASDGYLPDWLEDNLSEGIREWWDLKPGAPKPKANQQKQDDGRGLVLPGYKYLGPFNGLDKGEPVNAADAAALEHDKAYDQQLKAGDNPYLRYNHADAEFQERLQEDTSFGGNLGRAVFLAKKRVLEPFGLVEEGAKTAPGKKRPVEQSPQEPDSSSGIGKTGQQPAKKRLNFGQTGDSESVPDPQPLGEPPATPAAVGPTTMASGGGAPMADNNEGADGVGNASGNWHCDSTWLGDRVITTSTRTWALPTYNNHLYKQISSASTGASNDNHYFGYSTPWGYFDFNRFHCHFSPRDWQRLINNNWGFRPKRLNFKLFNIQVKEVTTNDGVTTIANNLTSTVQVFSDSEYQLPYVLGSAHQGCLPPFPADVFMIPQYGYLTLNNGSQAVGRSSFYCLEYFPSQMLRTGNNFTFSYTFEDVPFHSSYAHSQSLDRLMNPLIDQYLYYLNRTQNQSGSAQNNDLLFSRGSPAGMSVQPKNWLPGPCYRQQRVSKTKTDNNNSNFTWTGASKYNLNGRESIINPGTAMASHKDDKDKFFPMSGVMIFGKESAGASNTALDNVMITDEEEIKATNPVATERFGTVAVNLQSSSTDPATGDVHVMGALPGMVWQDRDVYLQGPIWAKIPHTDGHFHPSPLMGGFGLKNPPPQILIKNTPVPANPPAEFSATKFASFITQYSTGQVSVEIEWELQKENSKRWNPEVQYTSNYAKSANVDFTVDNNGLYTEPRPIGTRYLT

SEQ ID NO: 176 - protein, 734 aa, Adeno-associated virus 2
MAADGYLPDWLEDTLSEGIRQWWKLKPGPPPPKPAERHKDDSRGLVLPGCKYLGPFNGLDKGEPVNEADAAALEHDKAYDRQLDSGDNPYLKYNHADAEFQERLKEDTSFGGNLGRAVFQAKKRVLEPLGLVEEPVKTAPGKKRPVEHSPVEPDSSSGTGKAGQQPARKRLNFGQTGDADSVPDPQPLGQPPAAPSGLGTNTMATGSGAPMADNNEGADGVGNSSGNWHCDSTWMGDRVITTSTRTWALPTYNNHLYKQISSQSGASNDNHYFGYSTPWGYFDFNRFHCHFSPRDWQRLINNNWGFRPKRLNFKLFNIQVKEVTQNDGTTTIANNLTSTVQVFSDSEYQLPYVLGSAHQGCLPPFPADVFMIPQYGYLTLNNGSQAVGRSSFYCLEYFPSQMLRTGNNFTFNYTFEDVPFHSSYAHSQSLDRLMNPLIDQYLYYLNRTQNQSGSAQNNDLLFSRGSPAGMSVQPKNWLPGPCYRQQRVSKTKTDNNNSNFTWTGASKYNLNGRESIINPGTAMASHKDDKDKFFPMSGVMIFGKESAGASNTALDNVMITDEEEIKATNPVATERFGTVAVNLQSSSTDPATGDVHVMGALPGMVWQDRDVYLQGPIWAKIPHTDGHFHPSPLMGGFGLKNPPPQILIKNTPVPANPPAEFSATKFASFITQYSTGQVSVEIEWELQKENSKRWNPEVQYTSNYAKSANVDFTVDNNGLYTEPRPIGTRYLTRP

SEQ ID NO: 177 - protein, 734 aa, Adeno-associated virus 2
MAADGYLPDWLEDTLSEGIRQWWKLKPGPPPPKPAERHKDDSRGLVLPGYKYLGPFNGLDKGEPVNEADAAALEHDKAYDRQLDSGDNPYLKYNHADAEFQERLKEDTSFGGNLGRAVFQAKKRVLEPLGLVEEPVKTAPGKKRPVEHSPVEPDSSSGTGKAGQQPARKRLNFGQTGDADSVPDPQPLGQPPAAPSGLGTNTMATGSGAPMADNNEGADGVGNSSGNWHCDSTWMGDRVITTSTRTWALSTYNNHLYKQISSQSGASNDNHYFGYSTPWGYFDFNRFHCHFSPRDWQRLINNNWGFRPKRLNFKLFNIQVKEVTQNDGTTTIANNLTSTVQVFTDSEYQLPYVLGSAHQGCLPPFPADVFMVPQYGYLTLNNGSQAVGRSSFYCLEYFPSQMLRTGNNFTFSYTFEDVPFHSSYAHSQSLDRLMNPLIDQYLYYLSRTNTPSGTTTQSRLQFSQAGASDIRDQSRNWLPGPCYRQQRVSKTSADNNNSEYSWTGATKYHLNGRDSLVNPGPAMASHKDDEEKFFPQSGVLIFGKQGSEKTNVDIEKVMITDEEEIRTTNPVATEQYGSVSTNLQRGNRQAATADVNTQGVLPGMVWQDRDVYLQGPIWAKIPHTDGHFHPSPLMGGFGLKHPPPQILIKNTPVPANPSTTFSAAKFASFITQYSTGQVSVEIEWELQKENSKRWNPEIQYTSNYNKSINVDFTVDTNGVYSEPRPIGTRYLTRN

SEQ ID NO: 178 - protein, 738 aa, Adeno-associated virus 2
MAADGYLPDWLEDTLSEGIRQWWKLKPGPPPPKPAERHKDDSRGLVLPGYKYLGPFNGLDKGEPVNEADAAALEHDKAYDRQLDGGDNPYLKYNHADAEFQERLKEDTSFGGNLGRAVFQAKKRVLEPLGLVEEPVKTAPGKKRPVEHSPVEPDSSSGTGKAGQQPARKRLNFGQTGDADSVPDPQPLGQPPAAPSGLGTNTMATGSGAPMADNNEGADGVGNSSGNWHCDSTWMGDRVITTSTRTWALPTYNNHLYKQISSQSGASNDNHYFGYSTPWGYFDFNRFHCHFSPRDWQRLINNNWGFRPKRLNFKLFNIQVKEVTQNDGTTTIANNLTSTVQVFTDSEYQLPYVLGSAHQGCLPPFPADVFMVPQYGYLTLNNGSQAVGRSSFYCLEYFPSQMLRTGNNFTFSYTFEDVPFHSSYAHSQSLDRLMNPLIDQYLYYLSRTNTPSGTTTQSGLQFSQAGASDIRDQSRNWLPGPCYRQQRVSKTSADNNNSEYSWTGATKYHLNGRDSLVNPGPAMASHKDDEEKFFPQSGVLIFGKQGSEKTNVDIEKVMITDEEEIRTTNPVATEQYGSVSTNLQRGNRQAATADVNTQGVLPGMVWQDRDVYLQGPIWAKIPHTDGHFHPSPLMGGFGLKHPPPQILIKNTPVPANPSTTFSAAKFASFITQYSTGQVSVEIEWELQKENSKRWNPEIQYTSNYNKSVNVDFTVDTNGVYSEPRPIGTRYLTRNLLRP

SEQ ID NO: 179 - DNA, 2208 bp, Adeno-associated virus
atggctgccgatggttatcttccagattggctcgaggacactctctctgaaggaataagacagtggtggaagctcaaacctggcccaccaccaccaaagcccgcagagcggcataaggacgacagcaggggtcttgtgcttcctgggtacaagtacctcggacccttcaacggactcgacaagggggagccggtcaacgaggcagacgccgcggccctcgagcacgacaaggcctacgaccggcagctcgacagcggagacaacccgtacctcaagtacaaccacgccgacgcagagtttcaggagcgccttaaagaagatacgtcttttgggggcaacctcggacgagcagtcttccaggcgaaaaagagggttcttgaacctctgggcctggttgaggaacctgttaagacggctccgggaaaaaagaggccggtagagcactctcctgtggagccagactcctcctcgggaaccggaaaagcgggccagcagcctgcaagaaaaagattaaattttggtcagactggagacgcagactccgtacctgacccccagcctctcggacagccaccagcagccccctctggtctgggatctactacaatggctacaggcagtggcgcaccaatggcagacaataacgagggtgccgatggagtgggtaattcctcaggaaattggcattgcgattcccaatggctgggcgacagagtcatcaccaccagcacccgaacctgggccctgcccacatacaacaaccacctctacaagcaaatctccagccaatcaggagccagcaacgacaaccactactttggctacagcaccccctgggggtattttgacttcaacagattccactgccacttttcaccacgtgactggcaaagactcatcaacaacaactggggattccggcccaaaagactcaacttcaagctctttaatattcaagtcaaagaggtcacgcagaatggcggtacgacgacgattgccaataaccttaccagcacggttcaggtgtttactgactcggagtaccagctcccgtacgtcctgggctcggcgcatcaaggatgcctcccgccgtttccagcggacgtcttcatggtcccacagtatggatacctcaccctgaacaacgggagtcaggcggtaggacgctcttccttttactgcctggagtactttccttctcagatgctgcgtactggaaacaactttcagttcagctacacttttgaagacgtgcctttccacagcagctacgctcacagccagagtctggatcggctgatgaatcctctgatcgaccagtacctgtattatctgaacaagacacaaacaaatagtggaactcttcagcagtctcggctactgtttagccaagctggaccaaccaacatgtctcttcaagctaaaaactggctgcctggaccttgctacagacagcagcgtctgtcaaaacaggcaaacggcaacaacaacagcaactttccctggactgcagctacaaagtatcatctaaatggccgggactcgttggttaatccaggaccagctatggccagtcacaaggatgacgaagaaaagtttttccccatgcatggaaccctgatatttggtaaacaaggaacaaatgccaacgacgcggatttggaaaatgtcatgattacagatgaagaagaaatcagggccaccaatcccgtggctacggagcagtacgggactgtgtcaaataatttgcaaaactcaaacactggtccaactactggaactgtcaatcaccaaggagcgttacctggtatggtgtggcaggatcgagacgtgtacctgcagggacccatttgggccaagattcctcacaccgatggacactttcatccttctccactgacgggaggttttggactcaaacacccgcctcctcagatcatgatcaaaaacactcccgttccagccaatcctcccacaaacttcagttctgccaagtttgcttctttcatcacacagtattccacgggacaggtcagcgtggagatcgagtgggagctgcagaaggagaacagcaaacgctggaatcccgaaattcagtacacttccaactacaacaagtctgttaatgtggactttactgtggacactaatggtgtgtattcagagcctcgccccattggcaccagatacctgactcgtaatctgtaa

SEQ ID NO: 180 - protein, 735 aa, Adeno-associated virus
MAADGYLPDWLEDTLSEGIRQWWKLKPGPPPPKPAERHKDDSRGLVLPGYKYLGPFNGLDKGEPVNEADAAALEHDKAYDRQLDSGDNPYLKYNHADAEFQERLKEDTSFGGNLGRAVFQAKKRVLEPLGLVEEPVKTAPGKKRPVEHSPVEPDSSSGTGKAGQQPARKRLNFGQTGDADSVPDPQPLGQPPAAPSGLGSTTMATGSGAPMADNNEGADGVGNSSGNWHCDSQWLGDRVITTSTRTWALPTYNNHLYKQISSQSGASNDNHYFGYSTPWGYFDFNRFHCHFSPRDWQRLINNNWGFRPKRLNFKLFNIQVKEVTQNGGTTTIANNLTSTVQVFTDSEYQLPYVLGSAHQGCLPPFPADVFMVPQYGYLTLNNGSQAVGRSSFYCLEYFPSQMLRTGNNFQFSYTFEDVPFHSSYAHSQSLDRLMNPLIDQYLYYLNKTQTNSGTLQQSRLLFSQAGPTNMSLQAKNWLPGPCYRQQRLSKQANGNNNSNFPWTAATKYHLNGRDSLVNPGPAMASHKDDEEKFFPMHGTLIFGKQGTNANDADLENVMITDEEEIRATNPVATEQYGTVSNNLQNSNTGPTTGTVNHQGALPGMVWQDRDVYLQGPIWAKIPHTDGHFHPSPLTGGFGLKHPPPQIMIKNTPVPANPPTNFSSAKFASFITQYSTGQVSVEIEWELQKENSKRWNPEIQYTSNYNKSVNVDFTVDTNGVYSEPRPIGTRYLTRNL

SEQ ID NO: 181 - DNA, 2208 bp, Adeno-associated virus
atggctgccgatggttatcttccagattggctcgaggacactctctctgaaggaataagacagtggtggaagctcaaacctggcccaccaccaccaaagctcgcagagcggcatcaggacgacagcaggggtcttgtgcttcctgggtacaagtacctcggacccttcaacggactcgacaaaggagagccggtcaacgaggcagacgccgcggccctcgagcacgacaaggcctacgaccggcagctcgacagcggagacaacccgtacctcaagtacaaccacgccgacgcggagtttcaggagcgtcttaaagaagatacgtcttttgggggcaacctcggacgagcagtcttccaggcgaaaaagagggttcttgaacctctgggcctggttgaggaacctgttaagacggctccgggaaaaaagaggccggtagagcactctcctgtggagccagactcctcctcgggaaccggaaaggcgggccatcagcctgcgagaaagagattgaattttggtcagactggagacgcagactccgtacctgacccccagcctctcggacagccaccagcagcccccacaagtctgggatctactacaatggctacaggcagtggcgcaccaatggcagacaataacgagggtgccgatggagtgggtaattcctcaggaaattggcattgcgattcccaatggctgggcgacagagtcatcaccaccagcacccgaacctgggccctgcccacctacaacaaccacctctacaagcaaatctccagccaatcaggagcctcgaacgacaaccactactttggctacagcaccccctgggggtattttgacttcaacagattccactgtcacttctccccacgtgattggcaaagactcatcaacaacaactggggattccgacccaagagactcaacttcaagctctttaacattcaagtcaaagaggtcacgcagaatgacggtacgacgacgattgccaataaccttaccagcacggttcaggtgtttactgactcggagtaccagctcccgtacgtcctcggctcggcgcatcaaggatgcctcccgccgtttccagcggacgtcttcacggtcccacagtatggatacctcaccctgaacaacgggagtcaggcggtaggacgctcttccttttactgcctggagtactttccttctcagatgctgcgtactggaaacaaccttaccttcagctacacctttgaggacgttcctttccacagcagctacgctcacagccagagtttggaccggctgatgaatcctctgatcgaccagtatctatattatctgaacaggacacaatcaaatagtggaactcttcagcagtctaggctactgtttagccaagctggacccaccagcatgtctcttcaagctaaaaactggctgcctggaccttgctacagacagcagcgtctttcaaagcaggcaaacgacaacaacaacagcaactttccctggactgcggctacaaagtatcatctaaatggccgggactcgttggttaatccaggaccagctatggccagccacaaagacgatgaagaaaagtttttccccatgcatggaaccctgatatttggtaaacaaggaacaaatgctaacgacgcggatttggagcatgttatgattacagatgaagaagaaatcaggaccaccaatcctgtggctacagagcagtacggaaacgtgtcaaataatttgcaaaactcaaatactggtccaactacagaaaatgtcaatcaccagggagcgttacctggtatggtgtggcaggatcgagacgtgtacctgcagggacccatttgggccaagattcctcacaccgacggacactttcacccttctccactgatgggaggttttggactcaaacacccgcctcctcaaatcatgatcaaaaacactcccgttccagccaatcctcccacaaactacagttctgccaagtttgcttctttcatcacacagtattccacgggccaggtcagcgtggagattgagtgggagctgcggaaggagaacagcaaacgctggaaccccgagatccagtatacttccaactacaacaaatctgttaatgtggactttactgtggacactaatggtgtgtattcagagcctcgccccattggcaccagatacctgactcgtaatctgtaa

SEQ ID NO: 182 - protein, 735 aa, Adeno-associated virus
MAADGYLPDWLEDTLSEGIRQWWKLKPGPPPPKLAERHQDDSRGLVLPGYKYLGPFNGLDKGEPVNEADAAALEHDKAYDRQLDSGDNPYLKYNHADAEFQERLKEDTSFGGNLGRAVFQAKKRVLEPLGLVEEPVKTAPGKKRPVEHSPVEPDSSSGTGKAGHQPARKRLNFGQTGDADSVPDPQPLGQPPAAPTSLGSTTMATGSGAPMADNNEGADGVGNSSGNWHCDSQWLGDRVITTSTRTWALPTYNNHLYKQISSQSGASNDNHYFGYSTPWGYFDFNRFHCHFSPRDWQRLINNNWGFRPKRLNFKLFNIQVKEVTQNDGTTTIANNLTSTVQVFTDSEYQLPYVLGSAHQGCLPPFPADVFTVPQYGYLTLNNGSQAVGRSSFYCLEYFPSQMLRTGNNLTFSYTFEDVPFHSSYAHSQSLDRLMNPLIDQYLYYLNRTQSNSGTLQQSRLLFSQAGPTSMSLQAKNWLPGPCYRQQRLSKQANDNNNSNFPWTAATKYHLNGRDSLVNPGPAMASHKDDEEKFFPMHGTLIFGKQGTNANDADLEHVMITDEEEIRTTNPVATEQYGNVSNNLQNSNTGPTTENVNHQGALPGMVWQDRDVYLQGPIWAKIPHTDGHFHPSPLMGGFGLKHPPPQIMIKNTPVPANPPTNYSSAKFASFITQYSTGQVSVEIEWELRKENSKRWNPEIQYTSNYNKSVNVDFTVDTNGVYSEPRPIGTRYLTRNL

SEQ ID NO: 183 - DNA, 2208 bp, Adeno-associated virus
atggctgccgatggttatcttccagattggctcgaggacactctctctgaaggaataagacagtggtggaagctcaaacctggcccaccaccaccaaagcccgcagagcggcatcaggacgacagcaggggtcttgtgcttcctgggtacaagtacctcggacccttcaacggactcgacaaaggagagccggtcaacgaggcagacgccgcggccctcgagcacgacaaggcctacgaccggcagctcgacagcggagacaacccgtacctcaagtacaaccacgccgacgcggagtttcaggagcgtcttaaagaagatacgtcttttgggggcaacctcggacgagcagtcttccaggcgaaaaagagggttcttgaacctctgggcctggttgaggaacctgttaagacggctccgggaaaaaagaggccggtagagcactctcctgtggagccagactcctcctcgggaaccggaaaagcgggccatcagcctgcgagaaagagattgaattttggtcagactggagacgcagactccgtacctgacccccagcctctcggacagccaccagcagcccccacaagtttgggatctactacaatggctacaggcagtggcgcaccaatggcagacaataacgagggtgccgatggagtgggtaattcctcaggaaattggcattgcgattcccaatggctgggcgacagagtcatcaccaccagcacccgaacctgggccctgcccacctacaacaaccacctctacaagcaaatctccagccaatcaggagcctcgaacgacaaccactactttggctacagcaccccctgggggtattttgacttcaacagattccactgtcacttctccccacgtgattggcaaagactcatcaacaacaactggggattccgacccaagagactcaacttcaagctctttaacattcaagtcaaggaggtcacgcagaatgacggtacgacgacgattgccaataaccttaccagcacggttcaggtgtttactgactcggagtaccagctcccgtacgtcctcggctcggcgcatcaaggatgcctcccgccgtttccagcggacgtcttcatggtcccacagtatggatacctcaccctgaacaacgggagtcaggcggtaggacgctcttccttttactgcctggagtactttccttctcagatgctgcgtactggaaacaactttaccttcagctacacctttgaggacgttcctttccacagcagctacgctcacagccagagtttggaccggctgatgaatcctctgatcgaccagtatctatattatctgaacaggacacaatcaaatagtggaactcttcagcagtctaggctactgtttagccaagctggacccaccagcatgtctcttcaagctaaaaactggctgcctggaccttgctacagacagcagcgtctttcaaagcaggcaaacgacaacaacaacagcaactttccctggactgcggctacaaagtatcgtctaaatggccgggactcgttggttaatccaggaccagctatggccagccacaaagacgatgaagaaaagtttttccccatgcatggaaccctgatatttggtaaacaaggaacaaatgctaacgacgcggatttggagcatgttatgattacagatgaagaagaaatcaggaccaccaatcctgtggctacagagcagtacggaaacgtgtcaaataatttgcaaaactcaaatactggtccaactacagaaaatgtcaatcaccagggagcgttacctggtatggtgtggcaggatcgagacgtgtacctgcagggacccatttgggccaagattcctcacaccgacggacactttcacccttctccactgatgggaggttttggactcaaacacccgcctcctcaaatcatgatcaaaaacactcccgttccagccaatcctcccacaaacttcagttctgccaagtttgcttctttcatcacacagtattccacgggccaggtcagcgtggagattgagtgggagctgcagaaggagaacagcaaacgctggaaccccgagatccagtatacttccaactacaacaaatctgttaatgtggactttactgtggacactaatggtgtgtattcagagcctcgccccattggcaccagatacctgactcgtaatctgtaa

SEQ ID NO: 184 - protein, 735 aa, Adeno-associated virus
MAADGYLPDWLEDTLSEGIRQWWKLKPGPPPPKPAERHQDDSRGLVLPGYKYLGPFNGLDKGEPVNEADAAALEHDKAYDRQLDSGDNPYLKYNHADAEFQERLKEDTSFGGNLGRAVFQAKKRVLEPLGLVEEPVKTAPGKKRPVEHSPVEPDSSSGTGKAGHQPARKRLNFGQTGDADSVPDPQPLGQPPAAPTSLGSTTMATGSGAPMADNNEGADGVGNSSGNWHCDSQWLGDRVITTSTRTWALPTYNNHLYKQISSQSGASNDNHYFGYSTPWGYFDFNRFHCHFSPRDWQRLINNNWGFRPKRLNFKLFNIQVKEVTQNDGTTTIANNLTSTVQVFTDSEYQLPYVLGSAHQGCLPPFPADVFMVPQYGYLTLNNGSQAVGRSSFYCLEYFPSQMLRTGNNFTFSYTFEDVPFHSSYAHSQSLDRLMNPLIDQYLYYLNRTQSNSGTLQQSRLLFSQAGPTSMSLQAKNWLPGPCYRQQRLSKQANDNNNSNFPWTAATKYRLNGRDSLVNPGPAMASHKDDEEKFFPMHGTLIFGKQGTNANDADLEHVMITDEEEIRTTNPVATEQYGNVSNNLQNSNTGPTTENVNHQGALPGMVWQDRDVYLQGPIWAKIPHTDGHFHPSPLMGGFGLKHPPPQIMIKNTPVPANPPTNFSSAKFASFITQYSTGQVSVEIEWELQKENSKRWNPEIQYTSNYNKSVNVDFTVDTNGVYSEPRPIGTRYLTRNL

SEQ ID NO: 185 - DNA, 2208 bp, Adeno-associated virus
atggctgccgatggttatcttccagattggctcgaggacactctctctgaaggaataagacagtggtggaagctcaaacctggcccaccaccaccaaagcccgcagagcggcatcaggacgacagcaggggtcttgtgcttcctgggtacaagtacctcggacccttcaacggactcgacaaaggagagccggtcaacgaggcagacgccgcggccctcgagcacgacaaggcctacgaccggcagctcgacagcggagacaacccgtacctcaagtacaaccacgccgacgcggagtttcaggagcgtcttaaagaagatacgtcttttgggggcaacctcggacgagcagtcttccaggcgaaaaagagggttcttgaacctctgggcctggttgaggaacctgttaagacggctccgggaaaaaagaggccggtagagcactctcctgtggagccagactcctcctcgggaaccggaaaagcgggccatcagcctgcgagaaagagattgaattttggtcagactggagacgcagactccgtacctgacccccagcctctcggacagccaccagcagcccccacaagtttgggatctactacaatggctacaggcagtggcgcaccaatggcagacaataacgagggtgccgatggagtgggtaattcctcaggaaattggcattgcgattcccaatggctgggcgacagagtcatcaccaccagcacccgaacctgggccctgcccacctacaacaaccacctctacaagcaaatctccagccaatcaggagcctcgaacgacaaccactactttggctacagcaccccctgggggtattttgacttcaacagattccactgtcacttctccccacgtgattggcaaagactcatcaacaacaactggggattccgacccaagagactcaacttcaagctctttaacattcaagtcaaagaggtcacgcagaatgacggtacgacgacgattgccaataaccttaccagcacggttcaggtgtttactgactcggagtaccagctcccgtacgtcctcggctcggcgcatcaaggatgcctcccgccgtttccagcggacgtcttcatggtcccacagtatggatacctcaccctgaacaacgggagtcaggcggtaggacgcccttccttttactgcctggagtactttccttctcagatgctgcgtactggaaacaactttaccttcagctacacctttgaggacgttcctttccacagcagctacgctcacagccagagtttggaccggctgatgaatcctctgatcgaccagtatctatattatctgaacaggacacaatcaaatagtggaactcttcagcagtctaggctactgtttagccaagctggacccaccagcatgtctcttcaagctaaaaactggctgcctggaccttgctacagacagcagcgtctttcaaagcaggcaaacgacaacaacaacagcaactttccctggactgcggctacaaagtatcatctaaatggccgggactcgttggttaatccaggaccagctatggccagccacaaagacgatgaagaaaagtttttccccatgcatgggaccctgatatttggtaaacaaggaacaaatgctaacgacgcggatttggagcatgttatgattacagatgaagaagaaatcaggaccaccaatcctgtggctacagagcagtacggaaacgtgtcaaataatttgcaaaactcaaatactggtccaactacagaaaatgtcaatcaccagggagcgttacctggtatggtgtggcaggatcgagacgtgtacctgcagggacccatttgggccaagattcctcacaccgacggacactttcacccttctccactgatgggaggttttggactcaaacacccgcctcctcaaatcatgatcaaaaacactcccgttccagccaatcctcccacaaacttcagttctgccaagtttgcttctttcatcacacagtattccacgggccaggtcagcgtggagattgagtgggagctgcagaaggagaacagcaaacgctggaaccccgagatccagtatacttccaactacaacaaatctgttaatgtggactttactgtggacactaatggtgtgtattcagagcctcgccccattggcaccagatacctgactcgtaatctgtaa

SEQ ID NO: 186 - protein, 735 aa, Adeno-associated virus
MAADGYLPDWLEDTLSEGIRQWWKLKPGPPPPKPAERHQDDSRGLVLPGYKYLGPFNGLDKGEPVNEADAAALEHDKAYDRQLDSGDNPYLKYNHADAEFQERLKEDTSFGGNLGRAVFQAKKRVLEPLGLVEEPVKTAPGKKRPVEHSPVEPDSSSGTGKAGHQPARKRLNFGQTGDADSVPDPQPLGQPPAAPTSLGSTTMATGSGAPMADNNEGADGVGNSSGNWHCDSQWLGDRVITTSTRTWALPTYNNHLYKQISSQSGASNDNHYFGYSTPWGYFDFNRFHCHFSPRDWQRLINNNWGFRPKRLNFKLFNIQVKEVTQNDGTTTIANNLTSTVQVFTDSEYQLPYVLGSAHQGCLPPFPADVFMVPQYGYLTLNNGSQAVGRPSFYCLEYFPSQMLRTGNNFTFSYTFEDVPFHSSYAHSQSLDRLMNPLIDQYLYYLNRTQSNSGTLQQSRLLFSQAGPTSMSLQAKNWLPGPCYRQQRLSKQANDNNNSNFPWTAATKYHLNGRDSLVNPGPAMASHKDDEEKFFPMHGTLIFGKQGTNANDADLEHVMITDEEEIRTTNPVATEQYGNVSNNLQNSNTGPTTENVNHQGALPGMVWQDRDVYLQGPIWAKIPHTDGHFHPSPLMGGFGLKHPPPQIMIKNTPVPANPPTNFSSAKFASFITQYSTGQVSVEIEWELQKENSKRWNPEIQYTSNYNKSVNVDFTVDTNGVYSEPRPIGTRYLTRNL

SEQ ID NO: 187 - DNA, 2208 bp, Adeno-associated virus
atggctgccgatggttatcttccagattggctcgaggacactctctctgaaggaataagacagtggtggaagctcaaacctggcccaccaccaccaaagcccgcagagcggcataaggacgacagcaggggtcttgtgcttcctgggtacaagtacctcggacccttcaacggactcgacaagggagagccggtcaacgaggcagacgccgcggccctcgagcacgacaaggcctacgaccggcagctcgacagcggagacaacccgtacctcaagtacaaccacgccgacgcggagtttcaggagcgccttaaagaagatacgtcttttgggggcaacctcggacgagcagtcttccaggcaaaaaagagggttcttgaacctctgggcctggttgaggagcctgttaaaacggctccgggaaaaaagaggccggtagagcactctcctgcggagccagactcctcctcgggaaccggaaaagcgggccagcagcctgcaagaaaaagattgaatttcggtcagactggagacgcagactccgtacctgacccccagcctctcggacagccaccagcagccccctctggtctgggaactaatacgatggcttcaggcagtggcgcaccaatggcagacaataacgagggcgccgacggagtgggtaattcctcgggaaattggcattgcgattccacatggatgggcgacagagtcatcaccaccagcacccgaacttgggccctgcccacctacaacaaccatctctacaagcaaatctccagccaatcaggagccagcaacgacaaccactactttggctacagcaccccttgggggtattttgacttcaacagattccactgccacttttcaccacgtgactggcaaagactcatcaacaacaactggggattccggcccaagagactcaacttcaagctctttaacattcaagtcaaagaggtcacgcagaatgacggtacgacgacgattgccaataaccttaccagcacggttcaggtgtttactgactcggagtaccagctcccgtacgtcctcggctcggcgcatcaaggatgcctcccgccgttcccagcagacgtcttcatggtgccacagtatggatacctcaccctgaacaacgggagtcaggcagtaggacgctcttcattttactgcctggagtactttccttctcagatgctgcgtaccggaaacaactttaccttcagctacacctttgaggacgttcctttccacagcagctacgctcacagccagagtttggaccgtctcatgaatcctctcatcgaccagtacctgtattacttgagcagaacaaacactccaagcggaaccaccacgcagtccaggcttcagttttctcaggccggagcaagtgacattcgggaccagtctaggaactggcttcctggaccctgttaccgccagcagcgagtatcaaagacatctgcggataacaacaacagtgaatactcgtggactggagctaccaagtaccacctcaatggcagagactctctggtgaatccgggcccggccatggccagccacaaggacgatgaagaaaagttttttcctcagagcggggttctcatctttgggaagcaaggctcagagaaaacaaatgtggacattgaaaaggtcatgattacagacgaagaggaaatcaggaccaccaatcccgtggctacggagcagtatggttctgtatctaccaacctgcagggcggcaacacacaagcagctaccgcagatgtcaacacacaaggcgttcttccaggcatggtctggcaggacagagacgtgtacctgcaggggcccatctgggcaaagattccacacacggacggacattttcacccctctcccctcatgggcggattcggacttaaacaccctcctccacagattctcatcaagaacaccccggtacctgcgaatccttcgaccaccttcagtgcggcaaagtttgcttctttcatcacacagtattccacggggcaggtcagcgtggagatcgagtgggagctgcagaaggagaacagcaaacgctggaatcccgagatccagtacacttccaactacaacaaatctgttaatgtggactttactgttgacactaatggcgtgtattcagagcctcgccccattggcaccagatacctgactcgtaatctgtaa

SEQ ID NO: 188 - protein, 735 aa, Adeno-associated virus
MAADGYLPDWLEDTLSEGIRQWWKLKPGPPPPKPAERHKDDSRGLVLPGYKYLGPFNGLDKGEPVNEADAAALEHDKAYDRQLDSGDNPYLKYNHADAEFQERLKEDTSFGGNLGRAVFQAKKRVLEPLGLVEEPVKTAPGKKRPVEHSPAEPDSSSGTGKAGQQPARKRLNFGQTGDADSVPDPQPLGQPPAAPSGLGTNTMASGSGAPMADNNEGADGVGNSSGNWHCDSTWMGDRVITTSTRTWALPTYNNHLYKQISSQSGASNDNHYFGYSTPWGYFDFNRFHCHFSPRDWQRLINNNWGFRPKRLNFKLFNIQVKEVTQNDGTTTIANNLTSTVQVFTDSEYQLPYVLGSAHQGCLPPFPADVFMVPQYGYLTLNNGSQAVGRSSFYCLEYFPSQMLRTGNNFTFSYTFEDVPFHSSYAHSQSLDRLMNPLIDQYLYYLSRTNTPSGTTTQSRLQFSQAGASDIRDQSRNWLPGPCYRQQRVSKTSADNNNSEYSWTGATKYHLNGRDSLVNPGPAMASHKDDEEKFFPQSGVLIFGKQGSEKTNVDIEKVMITDEEEIRTTNPVATEQYGSVSTNLQGGNTQAATADVNTQGVLPGMVWQDRDVYLQGPIWAKIPHTDGHFHPSPLMGGFGLKHPPPQILIKNTPVPANPSTTFSAAKFASFITQYSTGQVSVEIEWELQKENSKRWNPEIQYTSNYNKSVNVDFTVDTNGVYSEPRPIGTRYLTRNL

SEQ ID NO: 189 - DNA, 3161 bp, Adeno-associated virus
gattgaatttagcggccgcgaattcgcccttgctgcgtcaactggaccaatgagaactttccattcaatgattgcgtcgacaagatggtgatctggtgggaggagggaaagatgaccgccaaggtcatggagtcggccaaagccattctcggaggaagcaaggtgcgcgtggaccagaaatgtaagtcctcggcccagatagacccgactcccgtgattgtcacctccaacaccaacatgtgcgccgtgattgacgggaactcaacgaccttcgagcaccagcagccgttgcaagaccggatgttcaaatttgaactcacccgccgtctggatcatgactttgggaaggtcaccaagcaggaagtcaaagactttttccggtgggcaaaggatcacgtggttgaggtggagcatgaattctacgtcaaaaagggtggagccaagaaaagacccgcccccagtgacgcagatataagtgagcccaaacgggcgcgcgggtcagttgcgcagccatcgacgtcagacgcggaagcttcgatcaactacgcggacaggtaccaaaacaaatgttctcgtcacgtgggcatgaatctgatgctgtttccctgcagacaatgcgagagaatgaatcaaaattcaaatatctgcttcactcacggacagaaggactgtttagagtgctttcccgtgtcagaatctcaacccgtttctgtcgtcaaaaaggcgtatcagaaactttgctacattcatcatatcatgggaaaggtgccagacgcttgcactgcctgcgatctggtcaatgtggatttggatgactgcatctctgaacaataaatgatttaaatcaggtatggctgccgatggttatcttccagattggctcaaggacactctctctgaaggaataagacagtggtggaagctcaaacctggcccaccaccaccaaagcccgcagagcggcataaggacgacagcgggggtcttgtgcttcctgggtacaagtacctcggacccttcaacggactcgacaagggagagccggtcaacgaggcagacgccgcggccctcgagtacgacaaggcctacgaccggcagctcgacagcggagacaacccgtacctcaagtacaaccacgccgacgcggagtttcaggagcgccttaaagaagatacgtcttttgggggcaacctcggacgagcagtcttccaggcgaaaaagagggttcttgaacctctgggcctggttgaggaacctgttaagacggctccgggaaaaaagaggccggtagagcactctcctgtggagccagactcctcctcgggaacaggaaaagcgggccagcagcctgcgagaaagagattgaattttggtcagactggagacgcagactccgtacctgacccccagcctctcggacagccaccagcagccccctctggtctgggaactaatacgatggctacaggcagtggcgcaccaatggcagacaataacgagggcgccgacggagtgggtaattcctcgggaagttggcattgcgattccacatggatgggcgacagagtcatcaccaccagcacccgaacctgggctctgcccacctacaacaaccatctgtacaagcagatctccagccaatcaggagccagcaacgacaaccactactttggctacagcaccccttgggggtattttgacttcaacagattccactgccacttttcaccacgtgactggcaaagactcatcaacaacaactggggattccggcccaagagactcaacttcaagctctttaacattcaagtcaaggaggtcacgcagaatgacggtacgacgacgattgccaataaccttaccagcacggttcaggtgtttactgactcggagtaccagctcccgtacgtccccggctcggcgcatcaaggatgcctcccgccgttcccagcagacgtcttcatggtgccacagtatggatacctcaccctgaacaacgggagtcaggcagtaggacgctcttcattttactgcctggagtactttccttctcagatgcttcgtaccggaaacaactttaccttcagctacacctttgaggatgttcctttccacagcagctacgctcacagccagagtttggaccgtctcatgaatcctctcatcgaccagtacctgtattacttgagcagaacaaacactccaagcggaaccaccacgcagtccaggcttcagttttctcaggccggagcaagtgacattcgggaccagtctaggaactggcttcctggaccctgttaccgccagcagcgagtatcaaagacagctgcggacaacaacaacagtgaatactcgtggactggagctaccaagtaccacctcaatggcagagactctctggtgaatccgggcccggccatggccagccacaaggacgatgaagaaaagttttttcctcaaagcggggttctcatctttgggaagcaaggctcagagaaaacaaatgtggacattgaaaaggtcatgattacagacgaagaggaaatcagaaccaccaatcccgtggccacggagcagtatggttctgtatctaccaacctccagagcggcaacacacaagcagctactgcagatgtcaacacacaaggcgttcttccaggcatggtctggcaggacagagacgtgcacctgcaggggcctatctgggcaaagattccacacacggacggacattttcacccctctcccctcatgggcggatttggacttaaacaccctcctccacagattctcatcaagaacaccccggtacctgcaaatccttcgaccaccttcagtgcggcaaagtttgcttccttcatcacacagtattccacagggcaggtcagcgtggagatcgagtgggagctgcagaaggagaacagcaaacgctggaaccccgagatccagtacacttccaactacaacaaatctgttaatgtggactttactgtggacactaatggtgtgtattcagagcctcgccccattggcaccagatacctgactcgtaatctgtaattgcttgttaatcaataaaccgtttaattcgtttcagttgaactttggtctctgcgaagggcgaattcgtttaaaccctgcaggactagtccctttagtgagg

SEQ ID NO: 190 - DNA, 3162 bp, Adeno-associated virus
gaattgaatttagcggccgcgaattcgcccttcgcagagaccaaagttcaactgaaacgaattaaacggtttattgattaacaagcaattacagattacgagtcaggtatctggtgccaatggggcgaggctctgaatacacgccattagtgtccacagtaaagtccacattaacagacttgttgtagttggaagtgtactgaatttcgggattccagcgtttgctgttttccttctgcagctcccactcgatctccacgctgacctgtcccgtggagtactgtgtgatgaaggaagcaaactttgccgcactgaaggtggtcgaaggattcgcaggtaccggggtgttcttgatgagaatctgtggaggagggtgtttaagtccgaatccacccatgaggggagaggggtgaaaatgtccgtccgtgtgtggaatctttgcccagatgggcccctgaaggtacacatctctgtcctgccagaccatgcctggaagaacgccttgtgtgttgacatctgcggtagctgcttgtctgttgcctctctggaggttggtagatacagaaccgtactgctccgtagccacgggattggttgtcctgatttcctcttcgtctgtaatcatgaccttttcaatgtccacatttgttttctctgagccttgcttcccaaagatgagaaccccgctctgaggaaaaaacttttcttcattgtccttgtggcttgccatggccgggcccggattcaccagagagtctctgccattgaggtggtacttggtagctccagtccacgagtattcactgttgttgttatccgcagatgtctttgatactcgctgctggcggtaacagggtccaggaagccagttcctagactggtcccgaatgtcactcgctccggcctgagaaaactgaagccttgactgcgtggtggttccacttggagtgtttgttgtgctcaagtaatacaggtactggtcgatgagaggattcatgagacggtccagactctggctgtgagcgtagccgctgtggaaaggaacgtcctcaaaagtgtagctgaaggtaaagttgtttccggtacgcagcatctgagaaggaaagtactccaggcagtaaaatgaagagcgtcctactgcctgactcccgttgttcagggtgaggtatccatactgtggcaccatgaagacgtctgctgggaacggcgggaggcatccttgatgcgccgagccgaggacgtacgggagctggtactccgagtcagtaaacacctgaaccgtgctggtaaggttattggcaatcgtcgtcgtaccgtcattctgcgtgacctctttgacttgaatgttaaagagcttgaagttgagtctcttgggtcggaatccccagttgttgttgatgagtctttgccagtcacgtggtgaaaagtggcagtggaatctgttgaagtcaaaatacccccaaggggtgctgtagccaaagtagtgattgtcgttcgaggctcctgattggctggaaatttgtttgtagaggtggttgttgtaggtgggcagggcccaggttcgggtgctggtggtgatgactctgtcgcccatccatgtggaatcgcaatgccaatttcccgaggaattacccactccgtcggcgccctcgttattgtctgccattggtgcgccactgcctgtagccatcgtattagttcccagaccagagggggctgctggtggctgtccgagaggctgggggtcaggtactgagtctgcgtctccagtctgaccaaaattcaatctttttcttgcaggctgctggcccgcctttccggttcccgaggaggagtctggctccacaggagagtgctctaccggcctcttttttcctggagccgtcttgacaggttccccaaccaggcccagaggttcaagaaccctctttttcgcctggaagactgctcgtccgaggttgcccccaaaagacgtatcttctttaaggcgctcctgaaactccgcgtcggcgtggttgtacttgaggtacgggttgtctccgctgtcgagctgccggtcgtaggctttgtcgtgctcgagggccgcggcgtctgcctcgttgaccggctctcccttgtcgagtccgttgaagggtccgaggtacttgtacccaggaagcacaagacccctgctgtcgtccttatgccgctctgcgggctttggtggtggtgggccaggtttgagcttccaccactgtcttattccttcagagagagtgtcctcgagccaatctggaagataaccatcggcagccatacctgatttaaatcatttattgttcaaagatgcagtcatccaaatccacattgaccagatcgcaggcagtgcaagcgtctggcacctttcccatgatatgatgaatgtagcacagtttctgatacgcctttttgacgacagaaacgggttgagattctgacacgggaaagcactctaaacagtctttctgtccgtgagtgaagcagatatttgaattctgattcattctctcgcattgtctgcagggaaacagcatcagattcatgcccacgtgacgagaacatttgttttggtacctgtctgcgtagttgatcgaagcttccgcgtctgacgtcgatggctgcgcaactgactcgcgcacccgtttgggctcacttatatctgcgtcactgggggcgggtcttttcttggctccaccctttttgacgtagaattcatgctccacctcaaccacgtgatcctttgcccaccggaaaaagtctttgacttcctgcttggtgaccttcccaaagtcatgatccagacggcgggtgagttcaaatttgaacatccggtcttgcaacggctgctggtgttcgaaggtcgttgagttcccgtcaatcacggcgcacatgttggtgttggaggtgacgatcacgggagtcgggtctatctgggccgaggacttgcatttctggtccacgcgcaccttgcttcctccgagaatggctttggccgactccacgaccttggcggtcatcttcccctcctcccaccagatcaccatcttgtcgacacagtcgttgaagggaaagttctcattggtccagttgacgcagcaagggcgaattcgtttaaacctgcaggactagtccctttagtgaggg

SEQ ID NO: 191 - DNA, 3164 bp, Adeno-associated virus
gcgaattgaatttagcggccgcgaattcgcccttcgcagagaccaaagttcaactgaaacgaattaaacggtttattgattaacaagcaattacaaattacgagtcaggtatctggtgccaatggggcgaggctctgaatacacgccattagtgtccacagtaaagtccacattaacagacttgttgtagttggaagtgtactgaatttcgggattccagcgtttgctgttttccttctgcagctcccactcgatctccacgctgacctgtcccgtggagtactgtgtgatgaaggaagcaaactttgccgcactgaaggtggtcgaaggattcgcaggtaccggggtgttcttgatgagaatctgtggaggagggtgtttaggtccgaatccacccatgaggggagaggggtgaaaatgtccgtccgtgtgtggaatctttgcccagatgggcccctgaaggtacacatctctgtcctgccagaccatgcctggaagaacgccttgtgtgttgacatctgcggtagctgcttgtctgttgcctctctggaggttggtagatacagaaccatactgctccgtagccacgggattggttgtcctgatttcctcttcgtctgtaatcatgaccttttcaatgtccacatttgttttctctgagccttgcttcccaaagatgagaaccccgctctgaggaaaaaacttttcttcattgtccttgtggcttgccatggccgggcccggattcaccagagagtctctgccattgaggtggtacttggtagctccagtccacgagtattcactgttgttgttatccgcagatgtctttgatactcgctgctggcggtaacagggtccaggaagccagttcctagactggtcccgaatgtcactcgctccggcctgagaaaactgaagccttgactgcgtggtggttccacttggagtgtttgttgtgctcaagtaatacaggtactggtcgatgagaggattcatgagacggtccagactctggctgtgagcgtagctgctgtggaaaggaacgtcctcaaaagtgtagctgaaggtaaagttgtttccggtacgcagcatctgagaaggaaagtactccgggcagtaaaatgaagagcgtcctactgcctgactcccgttgctcagggtgaggtatccatactgtggcaccatgaagacgtctgctgggaacggcgggaggcatccttgatgcgccgagccgaggacgtacgggagctggtactccgagtcagtaaacacctgaaccgtgctggtaaggttattggcaatcgtcgtcgtaccgtcattctgcgtgacctctttgacttgaatgttaaagagcttgaagttgagtctcttgggtcggaatccccagttgttgttgatgagtctttgccagtcacgtggtgaaaagtggcagtggaatctgttgaagtcaaaatacccccaaggggtgctgtagccaaagtagtgattgtcgttcgaggctcctgattggctggaaatttgtctgtagaggtggttgttgtaggtgggcagggcccaggttcgggtgctggtggtgatgactctgtcgcccatccatgtggaatcgcaatgccgatttcccgaggaattacccactccgtcggcgccctcgttattgtctgccattggtgcgccactgcctgtagccatcgtattagttcccagaccagagggggctgctggtggctgtccgagaggctgggggtcaggtactgagtctgcgtctccagtctgaccaaaattcaatctttttcttgcaggctgctggcccgcctttccggttcccgaggaggagtctggctccacaggagagtgctctaccggcctcttttttcccggagccgtcttaacaggttccccaaccaggcccagaggttcaagaaccctctttttcgcctggaagactgctcgtccgaggttgcccccaaaagacgtatcttctttaaggcgctcctgaaactccgcgtcggcgtggttgtacttgaggtacgggttgtctccgctgtcgagctgccggtcgtaggctttgtcgtgctcgagggccgcggcgtctgcctcgttgaccggctctcccttgtcgagtccgttgaagggtccgaggtacttgtacccaggaagcacaagacccctgctgtcgtccttatgccgctctgcgggctttggtggtggtgggccaggtttgagcttccaccactgtcttattccttcagagagagtgtcctcgagccaatctggaagataaccatcggcagccatacctgatttaaatcatttattgttcaaagatgcagtcatccaaatccacattgaccagatcgcaggcagtgcaagcgtctggcacctttcccatgatatgatgaatgtagcacagtttctgatacgcctttttgacgacagaaacgggttgagattctgacacgggaaagcactctaaacagtctttctgtccgtgagtgaagcagatatttgaattctgattcattctctcgcattgtctgcagggaaacagcatcagattcatgcccacgtgacgagaacatttgttttggtacctgtctgcgtagttgatcgaagcttccgcgtctgacgtcgatggctgcgcaactgactcgcgcacccgtttgggcccacttatatctgcgtcactgggggcgggtcttttcttggctccaccctttttgacgtagaattcatgctccacctcaaccacgtgatcctttgcccaccggaaaaagtctttgacttcctgcttggtgaccttcccaaagtcatgatccagacggcgggtgagttcaaatttgaacatccggtcttgcaacggctgctggtgttcgaaggtcgttgagttcccgtcaatcacggcgcacatgttggtgttggaggtgacgatcacgggagtcgggtctatctgggccgaggacttgcatttctggtccacgcgcaccttgcttcctccgagaatggctttggccgactccacgaccttggcggtcatcttcccctcctcccaccagatcaccatcttgtcgacacagtcgttgaagggaaagttctcattggtccagttgacgcagcaagggcgaattcgtttaaacctgcaggactagtccctttagtgaggg

SEQ ID NO: 192 - DNA, 3163 bp, Adeno-associated virus
accctcactaaagggactagtcctgcaggtttaaacgaattcgcccttgctgcgtcaactggagcaatgagaactttcccttcaacgactgtgtcgacaagatggtgatttggtgggaggaggggaagatgaccgccaaggtcgtggagtcggccaaagccattctcggaggaagcaaggtgcgcgtggaccagaaatgcaagtcctcggcccagatagatccgactcccgtgatcgtcacctccaacaccaacatgtgcgccgtgattgacgggaactcaacgaccttcgaacaccagcagccgttgcaagaccggatgttcaaatttgaactcacccgccgtctggatcatgactttgggaaggtcaccaagcaggaagtcaaagactttttccggtgggcaaaggatcacgtggttgaggtggagcatggattctacgtcaaaaagggtggagccaagaaaagacccgcccctagtgacgcagatataagtgagcccaaacgggtgcgcgagtcagttgcgcagccatcgacgtcggacgcggaagcttcgatcaactacgcggacaggtaccaaaacaaatgttctcgtcacgtgggcatgaatctgatgctgtttccctgcagacaatgcgagagaatgaatcaaaattcaaatatctgcttcactcacggacagaaagactgtttagagtgctttcccgtgtcagaatctcaacctgtttctgtcgtcaaaaaggcgtatcagaaactgcgctacattcatcatatcatgggaaaggtgccagacgcttgcactgcctgcgatctggtcaatgtggatttggatgactgcatctctgaacaataaatgatttaaatcaggtatggctgccgatggttatcttccagattggctcgaggacactctctctgaaggaataagacagtggtggaagctcaaacctggcccaccaccaccaaagcccgcagagcggcataaggacgacagcaggggtcttgtgcttcctgggtacaagtacctcggacccttcaacggactcgacaagggagagccggtcaacgaggcagacgccgcggccctcgagcacgacaaggcctacgaccggcagctcgacagcggagacaacccgtacctcaagtacaaccacgccgacgcggagtttcaggagcgtcttaaagaagatacgtcttttgggggcaacctcggacgagcagtcttccaggcgaaaaagagggttcttgaacctctgggcctggttgaggaacctgttaagacggctccgggaaaaaagaggccggtagagcactctcctgcggagccagactcctcctcgggaaccggaaaagcgggccagcagcctgcaagaaaaagactgaatttcggtcagactggagacgcagactccgtacctgacccccagcctctcggacagccaccagcagcccccacaagtttgggatctactacaatggctacaggcagtggcgcaccaatggcagacaataacgagggtgccgatggagtgggtaattcctcaggaaattggcattgcgattcccaatggctgggcgacagagtcatcaccaccagcacccgaacctgggccctgcccacctacaacaaccacctttacaagcaaatctccagccaatcaggagcctcaaacgacaaccactactttggctacagcaccccctgggggtattttgacttcaacagattccactgccacttttcaccacgtgactggcaaagactcatcaacaacaactggggattccgacccaagagactcaacttcaagctctttaacattcaagtcaaagaggtcacgcagaatgacggtacgacgacgattgccaataaccttaccagcacggttcaggtgtttactgactcggagtaccagctcccgtacgtcctcggctcggcgcatcaaggatgcctcccgccgtttccagcggacgtcttcatggtcccacagtatggatacctcaccctgaacaacgggagtcaggcggtaggacgctcttccttttactgcctggagtgctttccttctcagatgctgcgtactggaaacaactttcagttcagctacacttttgaagacgtgcctttccacagcagctacgctcacagccagagtttggatcggctgatgaatcctctgatcgaccagtacctgtattatctaaacagaacacaaacagctagtggaactcagcagtctcggctactgtttagccaagctggacccacaagcatgtctcttcaagctaaaaactggctgcctggaccgtgttatcgccagcagcgtttgtcaaagcaggcaaacgacaacaacaacagcaactttccctggactggagctaccaagtaccacctcaatggcagagactctttggtgaacccgggcccggccatggccagccacaaggacgatgaagaaaagtttttccccatgcatggaaccctaatatttggtaaagaaggaacaaatgctaccaacgcggaattggaaaatgtcatgattacagatgaagaggaaatcaggaccaccaatcccgtggctacagagcagtacggatatgtgtcaaataatttgcaaaactcaaatactgctgcaagtactgaaactgtgaatcaccaaggagcattacctggtatggtgtggcaggatcgagacgtgtacctgcagggacccatttgggccaagattcctcacaccgatggacactttcatccttctccactgatgggaggttttggactcaaacacccgcctcctcagattatgatcaaaaacactcccgttccagccaatcctcccacaaacttcagttctgccaagtttgcttccttcatcacacagtattccacgggacaggtcagcgtggagatcgagtgggagctgcagaaggagaacagcaaacgctggaatcccgaaattcagtacacttccaactacaacaaatctgttaatgtggactttactgtggacactaatggtgtgtattcagagcctcgccccattggcaccagatacctgactcgtaatctgtaattgcttgttaatcaataaaccgtttaattcgtttcagttgaactttggtctctgcgaagggcgaattcgcggccgctaaattcaattcgcc

SEQ ID NO: 193 - protein, 735 aa, Adeno-associated virus
MAADGYLPDWLEDTLSEGIRQWWKLKPGPPPPKPAERHKDDSRGLVLPGYKYLGPFNGLYKGEPVDEADAAALEHDKAYDRQLDSGDNPYLKYNHADAEFQERLKEDTSFGGNLGRAVFQAKKRVLEPLGLVGEPVKTAPGKKRPVEHSPVEPDSSSGTGKAGNQPARKRLNFGQTGDADSVPDPQPLGQPPAAPSGLGSTTMATGSGAPVADNNEGADGVGNSSGNWHCDSQWLGDRVITTSTRTWALPTYNNHLYKQISSQSGASNDNHYFGYSTPWGYFDFNRFHCHFSPRDRQRLINNNWGFRPKRLNFKLFNIQVKEVTQNDGTTTIANNLTSTVQVFTDSGYQLPYVLGLAHQGCLPPFPADVFMVPQYGYLTLNNGSQAVGRSSFYCLEYFPSQMLRTGNNFQFSYTFEDVPFHSSYAHSQSLDRLMNPLIDQYLYYLNKTQSNSGTLQQSRLLFSQAGPTSMSLQAKNWLPGPCYRQQRLSKQANDNNNSNFPWTAATKYHLNGRDSLVNPGPAMASHKDDEEKFFPMHGTLIFGKQGTNANDADLDNVMITDEEEIRTTNPVATEQYGYVSNNLQNSNTGPTTGTVNHQGALPGMVWQDRDVYLQGPIWAKIPHTDGHFHPSPLMGGFGLKHPPPQIMIKNTPVPANPPTNFSSAKFASFITQYSTGQVSVEIEWELQKEDSKRWNPEIQYTSNYNKPVNVDFTVDTNGVYSEPRPIGTRYLTRNL

SEQ ID NO: 194 - DNA, 2208 bp, Adeno-associated virus
atggctgccgatggttatcttccagattggctcgaggacactctctctgaaggaataagacagtggtggaagctcaaacctggcccaccaccaccaaagcccgcagagcggcataaggacgacagcaggggtcttgtgcttcctgggtacaagtacctcggacccttcaacggactctacaagggagagccggtcgacgaggcagacgccgcggccctcgagcacgacaaggcctacgaccggcagctcgacagcggagacaacccgtacctcaagtacaaccacgccgacgcggagtttcaggagcgccttaaagaagatacgtcttttgggggcaacctcggacgagcagtcttccaggccaaaaagagggttcttgaacctctgggcttggttggggagcctgttaaaacggctccgggaaaaaagaggccggtagagcactctcctgtggagccagactcctcctcgggaaccggaaaagcgggcaaccagcctgcaagaaaaagattgaattttggtcagactggagacgcagactccgtacctgacccccagcctctcggacagccaccagcagccccctctggtctgggatctactacaatggctacaggcagtggcgcaccagtggcagacaataacgagggtgccgatggagtgggtaattcctcaggaaattggcattgcgattcccaatggctgggcgacagagtcatcaccaccagcacccgaacctgggctctgcccacctacaataaccacctctacaagcaaatctccagccaatcaggagcctcaaacgacaaccactactttggctacagcaccccctgggggtattttgacttcaacagattccactgccacttttcaccacgtgaccggcaaagactcatcaacaacaactggggattccgaccaaaaagactcaacttcaagctctttaacattcaagtcaaagaggtcacgcagaatgacggtacgacgacgattgccaataaccttaccagcacggttcaggtgtttactgactcggggtaccagctcccgtacgtcctcggcttggcgcatcaaggatgcctcccgccgttcccagcagacgtcttcatggtgccacagtatggatacctcaccctgaacaacgggagtcaggcggtaggacgctcttccttttactgcctggagtactttccttctcagatgctgcgtactggaaacaactttcagttcagctacacctttgaagacgttcctttccacagcagctacgctcacagccagagtctggatcggctgatgaatcctctgatcgaccagtacctgtattatctgaacaagacacaatcaaatagtggaactcttcagcagtctcggctactgtttagccaagctggacccaccagcatgtctcttcaagctaaaaactggctgcctggaccttgctacagacagcagcgtctgtcaaagcaggcaaacgacaacaacaacagcaactttccctggactgcggctacaaagtatcatctaaatggccgggactcgttggttaatccaggaccagctatggccagccacaaagacgatgaagaaaagtttttccccatgcatggaaccctgatatttggtaaacaaggaacaaatgctaacgacgcggatttggacaatgtcatgattacagatgaagaagaaatccgcaccaccaatcccgtggctacggagcagtacggatatgtgtcaaataatttgcaaaactcaaatactggtccaactactggaactgtcaatcaccaaggagcgttacctggtatggtgtggcaggatcgagacgtgtacctgcagggacccatttgggccaagattcctcacaccgatggacactttcatccttctccacttatgggaggttttggactcaaacacccacctcctcagatcatgattaaaaacactcccgttccagccaatcctcccacaaacttcagttctgccaagtttgcttctttcatcacacagtattccacgggacaagtcagcgtggagatcgagtgggagctgcagaaggaggacagcaaacgctggaaccccgagatccagtacacttccaactataacaaacctgttaatgtggactttactgtggacactaatggtgtgtattcagagcctcgccccattggcaccagatacctgactcgtaatctgtaa

SEQ ID NO: 195 - DNA, 3161 bp, Adeno-associated virus
cgaattgatttagcggccgcgaattcgcccttcgcagagaccaaagttcaactgaaacgaattaaacggtttattgattaacaagcaattacagattacgagtcaggtatctggtgccaatggggcgaggctctgaatacacaccattagtgtccacagtaaagtccacattaacagatttgttgtagttggaagtgtactggatctcgggattccagcgtttgctgttctccttctgtagctcccactcgatctccacgctgacccgccccgtggaatactgtgtgatgaaggaagcaaactttgccgcactgaaggtggtcgaaggattcgcaggtaccggggtgtttttgatgagaatctgtggaggagggtgtttaagtccgaatccgcccatgaggggagaggggtgaaaatgtccgtccgtgtgcggaatctttgcccagataggcccctgcaggtacacgtctctgtcctgccagaccatgcctggaagaacgccttgtgtgttgacatctgcagtagatgcttgtgtgttgccgctctggaggttggtagatacagaaccatactgctccgtggccacgggattggtggttctgatttcctcttcgtctgtaatcatgaccttttcaatgtccacatttgttttctctgatccttgttttccaaagatgagaaccccgctctgaggaaaaaacttttcttcatcgtccttgtggctggccattgccgggcccggattcaccagagagtctctgccattgaggtggtacttggtagctccaatccacgagtattcactgttgttgttgtccgcagatgtctttgatactcgctgctggcggtaacagggtccaggaagccagttcctagactgatcccgaatgtcactcgctccggcctgagaaaactgaagcctggactgcgtggtggttccgcttggagtgtttgttctgctcaagtaatacaggtactggtcgatgagaggattcatgagacggtccaaactctggctgtgagcgtagctgctgtggaaaggaacatcctcaaaggtgtagctgaaggtaaagttgtttccggtacgcagcatctgagaagggaagtactccaggcagtaaaatgaagagcgtcctactgcctgactcccgttgttcagggtgaggtatccatactgtggcaccatgaagacgtctgctgggaacggcgggaggcatccttgatgcgccgagccgaggacgtacgggagctggtactccgagtcagtaaacacctgaaccgtgctggtaaggttattggcaatcgtcgtcgtaccatcattctgcgtgacctctctgacttgaatgttaaagagcttgaagttgagtctcttgggccggaatccccagttgttgttgatgagtctttgccagtcacgtggtgaaaagtggcagtggaatctgttgaagtcaaaatacccccaaggggtgctgtagccaaagtagtggttgtcgttgctggctcctgattggctggaaatctgcttgtacagatggttgttgtaggtgggcagagcccaggttcgggtgctggtggtgatgactctgtcgcccatccatgtggaatcgcaatgccaatttcccgaggaattacccactccgtcggcgccatcgttattgtctgccattggtgcgccactgcctgtagccatcgtattagttcccagaccagagggggctgctggtggctgtccgagaggctgggggtcaggtacggagtctgcgtctccagtctgaccgaaattcaatctctttcttgcaggctggttgcccgcttttccggttcccgaggaggagtctggctccacaggagagtgctctaccggcctcttttttcccggagccgtcttaacaggctcctcaaccaggcccagaggttcaagaaccctcttttttgcctggaagactgctcgtccgaggttgcccccaaaagacgtatcttctttaaggcgctcctgaaactccgcgtcggcgtggtcgtacttgaggtacgggttgtctccgctgtcgagctgccggtcgtaggccttgtcgtgctcgagggccgcggcgtctgcctcgttgaccggctctcccttgtcgagtccgttgaagggtccgaggtacttgtacccaggaagcacaagacccctgctgtcgtccttatgccgctctgcgggctttggtggtggtgggccaggtttgagcttccaccactgtcttattccttcagagagagtgtcctcgagccaatctggaagataaccatcggcagccatacctgatttaaatcatttattgttcagagatgcagtcatccaaatccacattgaccagatcgcaggcagtgcaagcgtctggcacctttcccatgatatgatgaatgtagcaaagtttctgatacgcctttttgacgacagaaacgggttgagattctgacacgggaaagcactctaaacagtctttctgtccgtgagtgaagcagatatttgaattctgattcattctctcgcattgtctgcagggaaacagcatcagattcatgcccacgtgacgagaacatttgttttggtacctgtccgcgtagttgatcgaagcttccgcgtctgacgtcgatggctgcgcaactgactcgcgcgcccgtttgggctcacttatatctgcgtcactgggggcgggtcttttcttggctccaccctttttgacgtagaattcatgctccacctcaaccacgtgatcctttgcccaccggaaaaagtctttcacttcctgcttggtgaccttcccaaagtcatgatccagacggcgggttagttcaaatttgaacatccggtcttgcaacggctgctggtgttcgaaggtcgttgagttcccgtcaatcacggcgcacatgttggtgttggaggtggcgatcacgggagtcgggtctatctgggccgaggacttgcacttttggtccacgcgcaccttgcttcctccgagaatggcttcggccgattccacgaccttggcggtcatctttccctcctcccaccagatcaccatcttgtcgacacagtcgttgaagggaaagttctcattggtccagttgacgcagcaagggcgaattcgtttaaacctgcaggaactagtcccttagtgagg

SEQ ID NO: 196 - protein, 735 aa, Adeno-associated virus
MAADGYLPDWLEDTLSEGIRQWWKLKPGPPPPKPAERHKDDSRGLVLPGYKYLGPFNGLYKGEPVNEADAAALEHDKAYDRQLDSGDNPYLKYNHAGAEFQERLKEDTSFGGNLGRAVFQAKKRVLEPLGLVEEPVKTAPGKKRPVEHSPVEPDSSSGTGKAGNQPARKRLNFGQTGDADSVPDPQPLGQPPAAPSGLGSTTMATGSGAPVADNNEGADGVGNSSGNWHCDSQWLGDRVITTSTRTWALPTYNNHLYKQISSQSGASNDNHYFGYSTPWGYFDFNRFHCHFSPRDWQRLINNNWGFRPKRLNFKLFNIQVKEVTQNDGTTTIANNLTSTVQVFTDSEYQLPYVLGSAHQGCLPPFPADVFMVPQYGYLTLNNGSQAVGRSSFYCLEYFPSQMLRTGNNFQFSYTFEDVPFHSSYAHSQSLDRLMNPLIDQYLYYLNKTQSNSGTLQQSRLLFSQAGPTSMSLQAKNWLPGPCYRQQRLSKQANDNNNSNFPWTAATKYHLNGRDSLVNPGPAMASHKDDEEKFFPMHGTLIFGKQGTNANDADLDNVMITDEEEIRTTNPVATEQYGYVSNNLQDSNTGPTTGTVNHQGALPGMVWQDRDVYLQGPIWAKIPHTDGHFHPSPLMGGFGLKHPPPQIMIKNTPVPANPPTNFSSAKFASFITQYSTGQVSVEIEWELQKENSKRWNPEIQYTSNYNKSVNVDFTVDTNGVYSEPRPIGTRYLTRNL

SEQ ID NO: 197 - DNA, 2208 bp, Adeno-associated virus
atggctgccgatggttatcttccagattggctcgaggacactctctctgaaggaataagacagtggtggaagctcaaacctggcccaccaccgccaaagcccgcagagcggcataaggacgacagcaggggtcttgtgcttcctgggtacaagtacctcggacccttcaacggactctacaagggagagccggtcaacgaggcagacgccgcggccctcgagcacgacaaggcctacgaccggcagctcgacagcggagacaacccgtacctcaagtacaaccacgccggcgcggagtttcaggagcgccttaaagaagatacgtcttttgggggcaacctcggacgagcagtcttccaggccaaaaagagggttcttgaacctctgggcttggttgaggagcctgttaaaacggctccgggaaaaaagaggccggtagagcactctcctgtggagccagactcctcctcgggaaccggaaaagcgggcaaccagcctgcaagaaaaagattgaattttggtcagactggagacgcagactccgtacctgacccccagcctctcggacagccaccagcagccccctctggtctgggatctactacaatggctacaggcagtggcgcaccagtggcagacaataacgagggtgccgatggagtgggtaattcctcaggaaattggcattgcgattcccaatggctgggcgacagagtcatcaccaccagcacccgaacctgggctctgcccacctacaacaaccacctctacaagcaaatctccagccaatcaggagcctcaaacgacaaccactactttggctacagcaccccctgggggtattttgacttcaacagattccactgccacttttcaccacgtgactggcaaagactcatcaacaacaactggggattccgaccaaagagactcaacttcaagctctttaacattcaagtcaaagaggtcacgcagaatgacggtacgacgacgattgccaataaccttaccagcacggttcaggtgtttactgactcggagtaccagctcccgtacgtcctcggctcggcgcatcaaggatgcctcccgccgttcccagcagacgtcttcatggtgccacagtatggatacctcaccctgaacaacgggagtcaggcggtaggacgctcttccttttactgcctggagtactttccttctcagatgctgcgtactggaaacaactttcagttcagctacacctttgaagacgttcctttccacagcagctacgctcacagccagagtctggatcggctgatgaatcctctgatcgaccagtacctgtattatctgaacaagacacaatcaaatagtggaacccttcagcagtctcggctactgtttagccaagctggacccaccagcatgtctcttcaagctaaaaactggctgcctggaccttgctacagacagcagcgtctgtcaaagcaggcaaacgacaacaacaacagcaactttccctggactgcggctacaaagtatcatctaaatggccgggactcgttggttaatccaggaccagctatggccagccacaaagacgatgaagaaaagtttttccccatgcatggaaccctgatatttggtaaacaaggaacaaatgctaacgacgcggatttggacaatgtcatgattacagatgaagaagaaatccgcaccaccaatcccgtggctacggagcagtacggatatgtgtcaaataatttgcaagactcaaatactggtccaactactggaactgtcaatcaccaaggagcgttacctggtatggtgtggcaggatcgagacgtgtacctgcagggacccatttgggccaagattcctcacaccgatggacactttcatccttctccacttatgggaggttttggactcaaacacccacctcctcagatcatgattaaaaacactcccgttccagccaatcctcccacaaacttcagttctgccaagtttgcttctttcatcacacagtattccacgggacaagtcagcgtagagatcgagtgggagctgcagaaggagaacagcaaacgctggaaccccgagatccagtacacttccaactataacaaatctgttaatgtggactttactgtggacactaatggtgtgtattcagagcctcgccccattggcaccagatacctgactcgtaatctgtaa

SEQ ID NO: 198 - protein, 738 aa, Adeno-associated virus
MAADGYLPDWLEDNLSEGIREWWDLKPGAPKPKANQQKQDDGRGLVLPGCKYLGPFNGLDKGEPVNAADAAALEHDKAYDQQLKAGDNPYLRYNHADAEFQERLQEDTSFGGNLGRAVFQAKKRVLEPLGLVEEGAKTAPGKKRPVEPSPQRSPDSSTGIGKTGQQPAKKRLNFGQTGDSESVPDPQPIGEPPAGPSGLGSGTMAAGGGAPMADNNEGADGVGSSSGNWHCDSTWLGDRVITTSTRTWALPTYNNHLYKQISNGTSGGSTNDNTYFGYSTPWGYFDFNRFHCHFSPRDWQRLINNNWGFRPKRLNFKLFNIQVKEVTQNEGTKTIANNLTSTIQVFTDSEYQLPYVLGSAHQGCPPPFPADVFMIPQYGYLTLNNGSQAVGRSSFYCLEYFPSQMRRTGNNFEFSYQFEDVPFHSSYAHSQSLDRLMNPLIDQYLYYLSRTQSTGGTAGTQQLLFSQAGPNNMSAQAKNWLPGPCYRQQRVSTTLSQNNNSNFAWTGATKYHLNGRDSLVNPGVAMATHKDDEERFFPSSGVLMFGKQGAGKDNVDYSSVMLTSEEEIKTTNPVATEQYGVVADNLQQQNAAPIVGAVNSQGALPGMVWQNRDVYLQGPIWAKIPHTDGNFHPSPLMGGFGLKHPPPQILIKNTPVPADPPTTFSQAKLASFITQYSTGQVSVEIEWELQKENSKRWNPEIQYTSNYNKSVNVDFTVDTNGVYSEPRPIGTRYLTRNL

SEQ ID NO: 199 - DNA, 2217 bp, Adeno-associated virus
atggctgccgatggttatcttccagattggctcgaggacaacctctctgagggcattcgcgagtggtgggacttgaaacctggagccccgaaacccaaagccaaccagcaaaagcaggacgacggccggggtctggtgcttcctggctgcaagtacctcggacccttcaacggactcgacaagggggagcccgtcaacgcggcggacgcagcggccctcgagcacgacaaggcctacgaccagcagctcaaagcgggtgacaatccgtacctgcggtataaccacgccgacgccgagtttcaggagcgtctgcaagaagatacgtcttttgggggcaacctcgggcgagcagtcttccaggccaagaagcgggttctcgaacctctcggtctggttgaggaaggcgctaagacggctcctggaaagaagagaccggtagagccatcaccccagcgttctccagactcctctacgggcatcggcaagacaggccagcagcccgcgaaaaagagactcaactttgggcagactggcgactcagagtcagtgcccgaccctcaaccaatcggagaaccccccgcaggcccctctggtctgggatctggtacaatggctgcaggcggtggcgctccaatggcagacaataacgaaggcgccgacggagtgggtagttcctcaggaaattggcattgcgattccacatggctgggcgacagagtcatcaccaccagcacccgaacctgggccctccccacctacaacaaccacctctacaagcaaatctccaacgggacatcgggaggaagcaccaacgacaacacctacttcggctacagcaccccctgggggtattttgactttaacagattccactgccacttctcaccacgtgactggcagcgactcatcaacaacaactggggattccggcccaagagactcaacttcaagctcttcaacatccaggtcaaggaggtcacgcagaatgaaggcaccaagaccatcgccaataaccttaccagcacgattcaggtctttacggactcggaataccagctcccgtacgtcctcggctctgcgcaccagggctgcccgcctccgttcccggcggacgtcttcatgattcctcagtacgggtacctgactctgaacaacggcagtcaggccgtgggccgttcctccttctactgcctggagtactttccttctcaaatgcggagaacgggcaacaactttgagttcagctaccagtttgaggacgtgccttttcacagcagctacgcgcatagccaaagcctggaccggctgatgaaccccctcatcgaccagtacctgtactacctgtctcggactcagtccacgggaggtaccgcaggaactcagcagttgctattttctcaggccgggcctaataacatgtcggctcaggccaaaaactggctacccgggccctgctaccggcagcaacgcgtctccacgacactgtcgcaaaataacaacagcaactttgcttggaccggtgccaccaagtatcatctgaatggcagagactctctggtaaatcccggtgtcgctatggcaacgcacaaggacgacgaagagcgattttttccatccagcggagtcttgatgtttgggaaacagggagctggaaaagacaacgtggactatagcagcgttatgctaaccagtgaggaagaaatcaaaaccaccaacccagtggccacagaacagtacggcgtggtggccgataacctgcaacagcaaaacgccgctcctattgtaggggccgtcaacagtcaaggagccttacctggcatggtctggcagaaccgggacgtgtacctgcagggtcctatctgggccaagattcctcacacggacggcaactttcatccttcgccgctgatgggaggctttggactgaaacacccgcctcctcagatcctgattaagaatacacctgttcccgcggatcctccaactaccttcagtcaagccaagctggcgtcgttcatcacgcagtacagcaccggacaggtcagcgtggaaattgaatgggagctgcagaaagagaacagcaagcgctggaacccagagattcagtatacttccaactataacaaatctgttaatgtggactttactgtggacactaatggtgtgtattcagagcctcgccccattggcaccagatacctgactcgtaatctgtaa

SEQ ID NO: 200 - DNA, 3167 bp, Adeno-associated virus
attgaatttagcggccgcgaattcgcccttcgcagagaccaaagttcaactgaaacgaattaaacggtttattgattaacaagcaattacagattacgagtcaggtacctggtgccaatggggcgaggctctgaatacacaccattagtgtccacagtaaagtccacattaacagatttgttgtagttggaagtgtactgaatctcgggattccagcgtttgctgttctccttctgcagctcccactcgatctccacgctgacctgccccgtggagtactgtgtaatgaaggaagcaaactttgccgcactgaaggtagtcgaaggattcgcaggtaccggggtgttcttgatgagaatctgcgggggagggtgtttaagtccgaatccgcccatgaggggagaggggtgaaaatgtccgtccgtgtgtggaatctttgcccagatgggcccctgcaggtacacgtctctgtcctgccacaccatgcctggaagaacgccttgtgtgttgacatctgaggtagctgcttgtgtgttgccgctctggaggttggtagatacagaaccatactgctccgtagccacgggattggtggtcctgatttcctcttcgtctgtaatcatgaccttttcaatgtccacattagtttttcccgagtcttgttttccaaagatgagaaccccgctctgaggaaaaaacttttcttcatcgtccttgtggctggccatggccgggcccggattcaccagagagtctcttccattaaggtggtacttggtagctccagtccacgagtattcactgttgttgttatccgcagatgtctttgatactcgctgctggcggtaacagggtccaggaagccagttcctagactggtcccgaatgtcacttgctccggcctgagaaaactgaagccttgactgcgtggtggttccgcttggagtgtttgttctgctcaagtaatacaggtactggtcgatgagaggattcatgagacggtccaaactctggctgtgggcgtagctgctgtggaaaggaacgtcctcaaaggtgtagctgaaggtaaagttgtttccggtacgcagcatctgagaaggaaagtactccaggcagtaaaatgaagagcgtcctactgcctgactcccgttgttcagggtgaggtatccatactgtggcaccatgaagacgtctgctgggaacggcgggaggcatccttgatgcgccgagccgaggacgtacgggagctggtactccgagtcagtaaacacctgaaccgtgctggtaaggttattggcaatcgtcgtcgtaccgtcattctgcgtgacctccttgacttgaatgttaaagagcttgaagttgagtcttttgggccggaatccccaattgttgttgatgagtctttgccagtcacgtggcgaaaagtggcagtggaatctgttgaagtcaaaatacccccaaggggtgctgtagccaaagtagtggttgtcgtttgaggctcctgattggctggaaatctgcttgtagaggtggttgttgtaggtgggcagagcccaggtgcgggtgctggtggtgatgactctgtcgcccatccatgtggaatcgcaatgccaatttcccgaggaattacccactccgtcggcgccctcgttattgtctgccattggtgcgccactgcctgtagccatcgtattagttcccagaccagagggggctgctggtggctgtccgagaggctgggggtcaggtacggagtctgcgtctccagtctgaccgaaattcaatctctttcttgcaggctgctggcccgcttttccggttcccgaggaggagtctggctccgcaggagagtgctctaccggcctcttttttcccggagccgtcttaacaggttcctcaaccaggcccagaggttcaagaaccctctttttcgcctggaagactgctcgtccgaggttgcccccaaaagacgtatcttctttaagacgctcctggaactccgcgtcggcgtggttgtacttggggtacgggttgtctccgctgtcgagctgccggtcgtaggccttgtcgtgctcgagggccgcggcgtctgcctcgttgaccggctctcccttgtcgagtccgttgaagggtccaaggtacttgtacccaggaagcacaagacccctgctgtcgtccttatgccgctctgcgggctttggtggtggtgggccaggtttgagcttccaccactgtcttattccttcagagagagtgtcctcgagccaatctggaagataaccatcggcagccatacctgatttaaatcatttattgttcagagatgcagtcatccaaatccacattgaccagatcgcaagcagtgcaagcgtctggcacctttcccatgatatgatgaatgtagcacagtttctgatacgcctttttgacgacagaaacgggttgagattctgacacgggaaagcactctaaacagtctttctgtccgtgagtgaagcagatatttgaattctgattcattctctcgcattgtctgcagggaaacagcatcagattcatgcccacgtgacgagaacatttgttttggtacctgtccgcgtagttgattgaagcttccgcgtctgacgtcgatggctgcgcaactgactcgcgcgcccgtttgggctcacttatatctgcgtcactgggggcgggtctttttttggctccaccctttttgacgtagaattcatgctctacctcaaccacgtgatcctttgcccaccggaaaaagtctttgacttcctgcttggtgaccttcccaaagtcatgatccagacggcgggtgagttcaaatttgaacatccggtcttgcaacggctgctggtgttcgaaggtcgttgagttcccgtcaatcactgcgcacatgttggtgttggaggtgacaatcacgggagtcgggtctatctgggccgaggacttgcatttctggtccacgcgcaccttgcttcctccgagaatggctttggccgactccacgaccttggcggtcatcttcccctcctcccaccagatcaccatcttgtcgacgcaatcattgaaaggaaagttctcattggtccagttgacgcagccgtagaaagggcgaattcgtttaaacctgcaggactagtccctttagtgagggt

SEQ ID NO: 201 - DNA, 3161 bp, Adeno-associated virus
aattgaatttagcggccgcgaattcgcccttcgcagagaccaaagttcaactgaaacgaattaaacggtttattgattaacaagcaattacagattacgagtcaggtatctggtgccaatggggcgaggctctgaatacacaccattagtgtccacagtaaagtccacattaacagatttgttgtagttggaagtgtactgaatctcgggattccagcgtttgctgttctccttctgcagctcccactcgatctccacgctgacctgccccgtggagtactgtgtaatgaaggaagcaaactttgccgcactgaaggtagtcgaaggattcgcaggtaccggggtgttcttgatgagaatctgcgggggagggtgtttaagtccgaatccgcccatgaggggagaggggtgaaaatgtccgtccgtgtgtggaatctttgcccagatgggcccctgcaggtacacgtctctgtcctgccacaccatgcctggaagaacgccttgtgtgttgacatctgaggtagctgcttgtgtgttgccgctctggaggttggtagatacagaaccatactgctccgtagccacgggattggtggtcctgatttcctcttcgtctgtaatcatgaccttttcaatgtccacattagtttttcccgagtcttgttttccaaagatgagaaccccgctctgaggaaaaaacttttcttcatcgtccttgtggctggccatggccgggcccggattcaccagagagtctcttccattaaggtggtacttggtagctccagtccacgagtattcactgttgttgttatccgcagatgtctttgatactcgctgctggcggtaacagggtccaggaagccagttcctagactggtcccgaatgtcacttgctccggcctgagaaaactgaagccttgactgcgtggtggttccgcttggagtgtttgttctgctcaagtaatacaggtactggtcgacgagaggattcatgagacggtccaaactctggctgtgggcgtagctgctgtggaaaggaacgtcctcaaaggtgtagctgaaggtaaagttgtttccggtacgcagcatctgagaaggaaagtactccaggcagtaaaatgaagagcgtcctactgcctgactcccgttgttcagggtgaggtatccatactgtggcaccatgaagacgtctgctgggaacggcgggaggcatccttgatgcgccgagccgaggacgtacgggagctggtactccgagtcagtaaacacctgaaccgtgctggtaaggttattggcaatcgtcgtcgtaccgtcattctgcgtgacctccttgacttgaatgttaaagagcttgaagttgagtcttttgggccgggatccccaattgttgttgatgagtctttgccagtcacgtggcgaaaagtggcagtggaatctgttgaagtcaaaatacccccaaggggtgctgtagccaaagtagtggttgtcgtttgaggctcctgattggctggaaatctgcctgtagaggtggttgttgtaggtgggcagagcccaggtgcgggtgctggtggtgatgactctgtcgcccatccatgtggaatcgcaatgccaatttcccgaggaattacccactccgtcggcgccctcgttattgtctgccattggtgcgccactgcctgtagccatcgtattagttcccagaccagagggggctgctggtggctgtccgagaggctgggggtcaggtacggagtctgcgtctccagtctgaccgaaattcaatctccttcttgcaggctgctggcccgcttttccggttcccgaggaggagtctggctccgcaagagagtgctctaccggcctcttttttcccggagccgtcttaacaggttcctcaaccaggcccagaggttcaagaaccctctttttcgcctggaagactgctcgtccgaggttgcccccaaaagacgtatcttctttaagacgctcctggaactccgcgtcggcgtggttgtacttgaggtacgggttgtctccgccgtcgagctgccggtcgtaggccttgtcgtgctcgagggccgcggcgtctgcctcgttgaccggctctcccttgtcgagtccgttgaagggtccaaggtacttgtacccaggaagcacaagacccctgctgtcgtccttatgccgctctgcgggctttggtggtggtgggccaggtttgagcttccaccactgtcttattccttcagagagagtgtcctcgagccaatctggaagataaccatcggcagccatacctgatttaaatcatttattgttcagagatgcagtcatccaaatccacattgaccagatcgcaagcagtgcaagcgtctggcacctttcccatgatatgatgaatgtagcacagtttctgatacgcctttttgacgacagaaacgggttgagattctgacacgggaaagcactctaaacagtctttctgtccgtgagtgaagcagatatttgaattctgattcattctctcgcattgtctgcagggaaacagcatcagattcatgcccacgtgacgagaacatttgttttggtacctgtccgcgtagttgattgaagcttccgcgtctgacgtcgatggctgcgcaactgactcgcgcgcccgtttgggctcacttatatctgcgtcactgggggcgggtctttttttggctccaccctttttgacgtagaattcatgctctacctcaaccacgtgatcctttgcccaccggaaaaagtctttgacttcctgcttggtgaccttcccaaagtcatgatccagacggcgggtgagttcaaatttgaacatccggtcttgcaacggctgctggtgttcgaaggtcgttgagttcccgtcaatcactgcgcacatgttggtgttggaggtgacaatcacgggagtcgggtctatctgggccgaggacttgcatttctggtccacgcgcaccttgcttcctccgagaatggctttggccgactccacgaccttggcggtcatcttcccctcctcccaccagatcaccatcttgtcgacgcaatcattgaaaggaaagttctcattggtccagttgacgcagcaagggcgaattcgtttaaacctgcaggactagtccctttagtgaggg

SEQ ID NO: 202 - DNA, 3172 bp, Adeno-associated virus
gattgaatttagcggccgcgaattcgcccttgctgcgtcaactggaccaatgagaactttcccttcaacgattgcgtcgacaagatggtgatctggtgggaggagggcaagatgaccgccaaggtcgtggagtccgccaaggccattctgggtggaagcaaggtgcgcgtggaccaaaagtgcaagtcatcggcccagatcgaccccacgcccgtgatcgtcacctccaacaccaacatgtgcgccgtgatcgacgggaacagcaccaccttcgagcaccagcagcccctgcaggaccgcatgttcaagttcgagctcacccgccgtctggagcacgactttggcaaggtgaccaagcaggaagtcaaagagttcttccgctgggctcaggatcacgtgactgaggtggcgcatgagttctacgtcagaaagggcggagccaccaaaagacccgcccccagtgacgcggatataagcgagcccaagcgggcctgcccctcagttgcggagccatcgacgtcagacgcggaagcaccggtggactttgcggacaggtaccaaaacaaatgttctcgtcacgcgggcatgcttcagatgctgtttccctgcaagacatgcgagagaatgaatcagaatttcaacgtctgcttcacgcacggggtcagagactgctcagagtgcttccccggcgcgtcggaatctcaacccgtcgtcagaaaaaagacgtatcagaaactgtgcgcgattcatcatctgctggggcgggcacccgagattgcgtgttcggcctgcgatctcgtcaacgtggacttggatgactgtgtttctgagcaataaatgacttaaaccaggtatggctgctgacggttatcttccagattggctcgaggacaacctctctgagggcattcgcgagtggtgggacctgaaacctggagcccccaagcccaaggccaaccagcagaagcaggacgacggccggggtctggtgcttcctggctacaagtacctcggacccttcaacggactcgacaagggggagcccgtcaacgcggcggacgcagcggccctcgagcacgacaaggcctacgaccagcagctcaaagcgggtgacaatccgtacctgcggtataaccacgccgacgccgagtttcaggagcgtctgcaagaagatacgtcttttgggggcaacctcgggcgagcagtcttccaggccaagaagcgggttctcgaacctctcggtctggttgaggaagctgctaagacggctcctggaaagaagagaccggtagaaccgtcacctcagcgttcccccgactcctccgcgggcatcggcaagaaaggccagcagcccgctaaaaagagactgaactttggtcagactggcgactcagagtcagtccccgaccctcaaccaatcggagaaccaccagcaggcccctctggtctgggatctggtacaatggctgcaggcggtggcgctccaatggcagacaataacgaaggcgccgacggagtgggtagttcctcaggaaattggcattgcgattccacatggctgggcgacagagtcatcaccaccagcacccgaacctgggccctgcccacctacaacaaccacctctacaagcaaatatccaatgggacatcgggaggaagcaccaacgacaacacctacttcggctacagcaccccctgggggtattttgacttcaacagattccactgccacttctcaccacgtgactggcagcgactcatcaacaacaactggggattccggccaaaaagactcagcttcaagctcttcaacatccaggtcaaggaggtcacgcagaatgaaggcaccgagaccatcgccaataaccttaccagcacgattcaggtatttacggactcggaataccagctgccgtacgtcctcggctccgcgcaccagggctgcctgcctccgttcccggcggacgtcttcatgattccccagtacggctaccttacactgaacaatggaagtcaagccgtaggccgttcctccttctactgcctggaatattttccatctcaaatgctgcgaactggaaacaattttgaattcagctacaccttcgaggacgtgcctttccacagcagctgcgcacacagccagagctcggaccgactgatgaatcctctcatcgaccagtacctgtactacttatccagaactcggtccacaggaggaactcaaggtacccagcaattgttattttctcaagctgggcctgcaaacatgtcggctcaggctaagaactggctacctggaccttgctaccggcagcagcgagtctctacgacactgtcgcaaaacaacaacagcaactttgcttggactggtgccaccaaatatcacctgaacggaagagactctttggtaaatcccggtgtcgccatggcaacccacaaggacgacgaggaacgcttcttcccgtcgagtggagtcctgatgtttggaaaacagggtgctggaagagacaatgtggactacagcagcgttatgctaaccagcgaagaagaaattaaaaccactaaccctgtagccacagaacaatacggtgtggtggctgacaacttgcagcaaaccaatacagggcctattgtgggaaatgtcaacagccaaggagccttacctggcatggtctggcagaaccgagacgtgtacctgcagggtcccatctgggccaagattcctcacacggacggcaacttccacccttcaccgctaatgggaggatttggactgaagcacccacctcctcagatcctgatcaagaacacgccggtacctgcggatcctccaacaacgttcagccaggcgaaattggcttccttcattacgcagtacagcaccggacaggtcagcgtggaaatcgagtgggagctgcagaaggagaacagcaaacgctggaacccagagattcagtacacttcaaactactacaaatctacaaatgtggactttgctgtcaatacagagggaacttattctgagcctcgccccattggtactcgttacctcacccgtaatctgtaattgctggttaatcaataaaccgtttgattcgtttcagttgaactttggtctctgcgaagggcgaattcgtttaaacctgcaggactagtccctttagtgagg

SEQ ID NO: 203 - DNA, 3172 bp, Adeno-associated virus
gattgaatttagcggccgcgaattcgcccttgctgcgtcaactggaccaatgagaactttcccttcaacgattgcgtcgacaagatggtgatctggtgggaggagggcaagatgaccgccaaggtcgtggagtccgccaaggccattctgggtggaagcaaggtgcgcgtggaccaaaagtgcaagtcatcggcccagatcgaccccacgcccgtgatcgtcacctccaacaccaacatgtgcgccgtgatcggcgggaacagcaccaccttcgagcaccagcagcccctgcaggaccgcatgttcaagttcgagctcacccgccgtctggagcacgactttggcaaggtgaccaagcaggaagtcaaagagttcttccgctgggctcaggatcacgtgactgaggtggcgcatgagttctacgtcagaaagggcggagccaccaaaagacccgcccccagtgacgcggatataagcgagcccaagcgggcctgcccctcagttgcggagccatcgacgtcagacgcggaagcaccggtggactttgcggacaggtaccaaaacaaatgttctcgtcacgcgggcatgcttcagatgctgtttccctgcaagacatgcgagagaatgaatcagaatttcaacgtctgcttcacgcacggggtcagagactgctcagagtgcctccccggcgcgtcagaatctcaacccgtcgtcagaaaaaagacgtatcagaaactgtgcgcgattcatcatctgctggggcgggcacccgagattgcgtgttcggcctgcgatctcgtcaacgtggacttggatgactgtgtttctgagcaataaatgacttaaaccaggtatggctgctgacggttatcttccagattggctcgaggacaacctctctgagggcattcgcgagtggtgggacctgaaacctggagcccccaagcccaaggccaaccagcagaagcaggacgacggccggggtctggtgcttcttggctacaagtacctcggacccttcaacggactcgacaagggggagcccgtcaatgcggcggacgcagcggccctcgagcacgacaaggcctacgaccagcagctcaaagcgggtgacaatccgtacctgcggtataaccacgccgacgccgagtttcaggagcgtctgcaagaagatacgtcttttgggggcaacctcgggcgagcagtcttccaggccaagaagcgggttctcgaacctctcggtctggttgaggaagctgctaagacggctcctggaaagaagagaccggtagaaccgtcacctcagcgttcccccgactcctccacgggcatcggcaagaaaggccagcagcccgctaaaaagagactgaactttggtcagactggcgactcagagtcagtccccgaccctcaaccaatcggagaaccaccagcaggcccctctggtctgggatctggtacaatggctgcaggcggtggcgctccaatggcagacaataacgaaggcgccgacggagtgggtagttcctcaggaaattggcattgcgattccacatggctgggcgacagagtcatcaccaccagcacccgaacctgggccctgcccacctacaacaaccacctctacaagcaaatatccaatgggacatcgggaggaagcaccaacgacaacacctacttcggctacagcaccccctgggggtattttgacttcaacagattccactgccacttctcaccacgtgactggcagcgactcatcaacaacaactggggattccggccaaaaagactcagcttcaagctcttcaacatccaggtcaaggaggtcacgcagaatgaaggcaccaagaccatcgccaataaccttaccagcacgattcaggtatttacggactcggaataccagctgccgtacgtcctcggctccgcgcaccagggctgcctgcctccgttcccggcggacgtcttcatgattccccagtacggctaccttacactgaacaatggaagtcaagccgtaggccgttcctccttctactgcctggaatattttccatctcaaatgctgcgaactggaaacaattttgaattcagctacaccttcgaggacgtgcctttccacagcggctacgcacacagccagagcttggaccgactgatgaatcctctcatcgaccagtacctgtactacttatccagaactcagtccacaggaggaactcaaggtacccagcaattgttattttctcaagctgggcctgcaaacatgtcggctcaggctaagaactggctacctggaccttgctaccggcagcagcgagtctctacgacactgtcgcaaaacaacaacagcaactttgcttggactggtgccaccaaatatcacctgaacggaagagactctttggtaaatcccggtgtcgccatggcaacccacaaggacgacgaggaacgcttcttcccgtcgagtggagtcctgatgtttggaaaacagggtgctggaagagacaatgtggactacagcagcgttatgctaaccagcgaagaagaaattaaaaccactaaccctgtagccacagaacaatacggtgtggtggctgacaacttgcagcaaaccaatacagggcctattgtgggaaatgtcaacagccaaggagccttacctggcatggtctggcagaaccgagacgtgtacctgcagggtcccatctgggccaagattcctcacacggacggcaacttccacccttcaccgctaatgggaggatttggactgaagcacccacctcctcagatcctgatcaagaacacgccggtacctgcggatcctccaacgacgttcagccaggcgaaattggcttccttcattacgcagtacagcaccggacaggtcagcgtggaaatcgagtgggagctgcagaaggagaacagcaaacgctggaacccagagattcagtacacttcaaactactacaaatctacaaatgtggactttgctgtcaatacagagggaacttattctgagcctcgccccattggtactcgttacctcacccgtaatctgtaattgctggttaatcaataaaccgtttgattcgtttcagttgaactttggtctctgcgaagggcgaattcgtttaaacctgcaggactagtccctttagtgagg

SEQ ID NO: 204 - DNA, 2208 bp, Adeno-associated virus
atggctgccgatggttatcttccagattggctcgaggacactctctctgaaggaataagacagtggtggaagctcaaacctggcccaccaccaccaaagcccgcagagcggcataaggacgacagcaggggtcttgtgcttcctgggtacaagtacctcggacccttcaacggactcgacaagggagagccggtcaacgaggcagacgccgcggccctcgagcacgacaaggcctacgaccggcagctcgaaagcggagacaacccgtacctcaagtacaaccacgccgacgcggagtttcaggagcgtcttaaagaagatacgtcttttgggggcaacctcggacgagcagtcttccaggcgaaaaagagggttcttgaacctctgggcctggttgaggagcctgttaaaacggctccgggaaaaaagaggccggtagagcactctcctgtggagccagactcctcctcgggaaccggaaaagcgggccagcagcctgcgagaaaaagattgaattttggtcagactggagacgcagactccgtacctgacccccagcctctcggacagccaccagcagccccctctggtctgggatctactacaatggcttcaggcagtggcgcaccagtggcagacaataacgagggtgccgatggagtgggtaattcctcaggaaattggcattgcgattcccaatggctgggcgacagagtcatcaccaccagcacccgaacctgggccctgcccacctacaacaaccacctctacaagcaaatctccagccaatcaggagcctcaaacgacaaccactactttggctacagcaccccctgggggtattttgacttcaacagattccactgccacttttcaccacgtgactggcaaagactcatcaacaacagctggggattccgacccaaaagactcaacttcaagctctttaacattcaagtcaaagaggtcacgcagaatgacggtacgacgacgattgccaataaccttaccagcacggttcaagtgtttaccgactcggagtaccagctcccgtacgtcctcggctcggcgcatcaaggatgcctcccgccgttcccagcagacgtctttatggtcccacagtatggatacctcaccctgaacaacgggagtcaggcggtaggacgctcttccttttactgcctggagtactttccttctcagatgctgcgtactggaaacaactttcagttcagctacacctttgaagacgttcccttccacagcagctacgctcacagccagagtctggatcggctgctgaatcctctgatcgaccagtacctatattatctgaacaagacacaatcaaatagtggaactcttcagcagtctcggctactgtttagccaagctggacccaccagcatgtctcttcaagctaaaaactggctgcctggaccttgctacagacagcagcgtctgtcaaagcaggcaaacgacaacaacaacagcaactttccctggactgcggctacaaagtatcatctaaatggccgggactcgttggttaatccaggaccagctatggccagccacaaagacgatgaagaaaagtttttccccatgcatggaaccctgatatttggtaaacaaggaacaaatgctaacgacgcggatttggacaatgtcatgattacagatgaagaagaaatccgcaccaccaatcccgtggctacggagcagtacggatatgtgtcaaataatttgcaaaactcaaatactggtccaactactggaactgtcaatcaccaaggagcgttacctggtatggtgtggcaggatcgagacgtgtacctgcagggacccatttgggccaagattcctcacacggacgggcactttcatccttctccactaatgggaggttttgggctcaaacacccgcctcctcagatcatgatcaaaaacactcccgttccagccaatcctcctacaaacttcagttcttccaagtttgcttctttcatcacacagtattccacggggcaggtcagcgtggagatcgagtgggagctgcagaaggagaacagcaaacgctggaatcccgaaattcagtatacttccaactacaacaaatctgttaatgtggactttactgtggacactaatggtgtgtattcagagcctcgccccattggcaccagatacccgactcgtaatctgtaa

SEQ ID NO: 205 - protein, 735 aa, Adeno-associated virus
MAADGYLPDWLEDTLSEGIRQWWKLKPGPPPPKPAERHKDDSRGLVLPGYKYLGPFNGLDKGEPVNEADAAALEHDKAYDRQLESGDNPYLKYNHADAEFQERLKEDTSFGGNLGRAVFQAKKRVLEPLGLVEEPVKTAPGKKRPVEHSPVEPDSSSGTGKAGQQPARKRLNFGQTGDADSVPDPQPLGQPPAAPSGLGSTTMASGSGAPVADNNEGADGVGNSSGNWHCDSQWLGDRVITTSTRTWALPTYNNHLYKQISSQSGASNDNHYFGYSTPWGYFDFNRFHCHFSPRDWQRLINNSWGFRPKRLNFKLFNIQVKEVTQNDGTTTIANNLTSTVQVFTDSEYQLPYVLGSAHQGCLPPFPADVFMVPQYGYLTLNNGSQAVGRSSFYCLEYFPSQMLRTGNNFQFSYTFEDVPFHSSYAHSQSLDRLLNPLIDQYLYYLNKTQSNSGTLQQSRLLFSQAGPTSMSLQAKNWLPGPCYRQQRLSKQANDNNNSNFPWTAATKYHLNGRDSLVNPGPAMASHKDDEEKFFPMHGTLIFGKQGTNANDADLDNVMITDEEEIRTTNPVATEQYGYVSNNLQNSNTGPTTGTVNHQGALPGMVWQDRDVYLQGPIWAKIPHTDGHFHPSPLMGGFGLKHPPPQIMIKNTPVPANPPTNFSSSKFASFITQYSTGQVSVEIEWELQKENSKRWNPEIQYTSNYNKSVNVDFTVDTNGVYSEPRPIGTRYPTRNL

SEQ ID NO: 206 - DNA, 2208 bp, Adeno-associated virus
atggctgccgatggttatcttccagattggctcgaggacactctctctgaaggaataagacagtggtggaagctcaaacctggcccaccaccaccaaagcccgcagagcggcataaggacgacagcaggggtcttgtgcttcctgggtacaagtacctcggacccttcaacggactcgacaagggagagccggtcaacgaggcagacgccgcggccctcgagcacgacaaggcctacgaccggcagctcgacagcggagacaacccgtacctcaagtacaaccacgccgacgcggagtttcaggagcgtcttaaagaagatacgtcttttgggggcaacctcggacgagcagtcttccaggccaaaaagaggattcttgaacctctgggcctggttgaggaacctgttaagacggctccgggagaaaagaggccggtagagcactctcctgcggagccagactcctcctcgggaaccggaaaagcgggccagcagcctgcaagaaagagattgaattttggccagactggagacgcagactcagtacctgacccccagcctctcggacagccaccagcagccccctctggtctgggaactaatacgatggcttcaggcagtggcgcaccaatggcagacaataacgagggcgccgacggagtgggtaattcctcgggaaattggtattgcgattccacatggatgggcgacagagtcatcaccaccagcacccgcacctgggccctgcccacctacaacaaccatctgtacaagcaaatctccagccagtctggagccagcaacgacaaccactactttggctacagcaccccctgggggtattttgacttcaacagattccactgccacttctccccacgtgactggcaaagactcatcaacaacaactggggattccggcccaagagactcagcttcaagctctttaacattcaagtcaaagaggtcacgcagaatgacggtacgacgacgattgccaataaccttaccagcacggttcaggtgtttactgactcggagtaccagctcccgtacgtcctcggctcggcgcatcaaggatgcctcccgccgttcccagcagacgtcttcatggtgccacagtatggatacctcaccctgaacaacggcagtcaggcggtaggacgctcttccttttactgcctggagtactttccttctcagatgcttcgtaccggaaacaactttaccttcagctacacctttgaagacgttcctttccatagcagctacgctcacagccaaagtctggaccgtctcatgaatcctctcatcgaccagtacctgtattacttgagcagaacaaacactccaagcggaaccaccacgatgtccaggcttcagttttctcaggccggagcaagtgacattcgggaccagtctagaaactggcttcctggaccctgttaccgccagcagcgagtatcaaagacagctgcggacaacaacaacagtgattactcgtggactggagctaccaagtaccacctcaatggaagagactctctggtgaatccgggcccagctatggccagccacaaggacgatgaagaaaaatattttcctcagagcggggttctcatctttggaaaacaagactcgggaaaaactaatgtggacattgaaaaggttatgattacagacgaagaggaaatcaggaccaccaatcccgtggctacggagcagtatggttctgtatctaccaacctccagagcggcaacacacaagcagctacctcagatgtcaacacacaaggcgttcttccaggcatggtctggcaggacagagacgtgtacctgcaggggcccatctgggcaaagattccacacacggacggacattttcacccctctcccctcgtgggcggattcggacttaaacaccctcctccacaaattctcatcaagaacaccccggtacctgcgaatccttcgaccactttcagtgcggcaaagtttgcttccttcatcacacagtactccacggggcaggtcagcgtggagatcgagtgggagctgcagaaggagaacagcaaacgctggaatcccgaaattcagtacacttccaactacaacaaatctgttaatgtggactttactgtggacactaatggtgtgtattcagagcctcgccccattggcaccagatacctgactcgtaatctgtaa

SEQ ID NO: 207 - protein, 735 aa, Adeno-associated virus
MAADGYLPDWLEDTLSEGIRQWWKLKPGPPPPKPAERHKDDSRGLVLPGYKYLGPFNGLDKGEPVNEADAAALEHDKAYDRQLDSGDNPYLKYNHADAEFQERLKEDTSFGGNLGRAVFQAKKRILEPLGLVEEPVKTAPGEKRPVEHSPAEPDSSSGTGKAGQQPARKRLNFGQTGDADSVPDPQPLGQPPAAPSGLGTNTMASGSGAPMADNNEGADGVGNSSGNWYCDSTWMGDRVITTSTRTWALPTYNNHLYKQISSQSGASNDNHYFGYSTPWGYFDFNRFHCHFSPRDWQRLINNNWGFRPKRLSFKLFNIQVKEVTQNDGTTTIANNLTSTVQVFTDSEYQLPYVLGSAHQGCLPPFPADVFMVPQYGYLTLNNGSQAVGRSSFYCLEYFPSQMLRTGNNFTFSYTFEDVPFHSSYAHSQSLDRLMNPLIDQYLYYLSRTNTPSGTTTMSRLQFSQAGASDIRDQSRNWLPGPCYRQQRVSKTAADNNNSDYSWTGATKYHLNGRDSLVNPGPAMASHKDDEEKYFPQSGVLIFGKQDSGKTNVDIEKVMITDEEEIRTTNPVATEQYGSVSTNLQSGNTQAATSDVNTQGVLPGMVWQDRDVYLQGPIWAKIPHTDGHFHPSPLVGGFGLKHPPPQILIKNTPVPANPSTTFSAAKFASFITQYSTGQVSVEIEWELQKENSKRWNPEIQYTSNYNKSVNVDFTVDTNGVYSEPRPIGTRYLTRNL

SEQ ID NO: 208 - DNA, 2209 bp, Adeno-associated virus
atggctgccgatggttatcctccagattggctcgaggacactctctctgaagggataagacagtggtggaagctcaaacctggcccaccaccaccaaagcccgcagagcggcataaggacgacagcaggggtcttgtgcttcctgggtacaagtacctcggacccttcaacggactcgacaagggggagccggtcaacgaggcagacgccgcggccctcgagcacgacaaggcctacgaccggcagctcgacagcggagacaacccgtacctcaagtacaaccacgccgacgcagagtttcaggagcgccttaaagaagatacgtcttttgggggcaacctcggacgagcagtcttccaggcgaaaaagagggttcttgaacctctgggcctggttgaggaacctgttaagacggctccgggaaaaaagaggccggtagagcactctcctgtggagccagactcctcctcgggaaccggaaaagcgggccagcggcctgcaagaaaaagattaaattttggtcagactggagacgcagactccgtacctgacccccagcctctcggacagccaccagcagccccctctggtctgggatctactacaatggctacaggcagtggcgcaccaatggcagacaataacgagggtgccgatggagtgggtaattcctcaggaaattggcattgcgattcccaatggctgggcgacagagtcatcaccaccagcacccgaacctgggccctgcccacatacaacaaccacctctacaagcaaatctccagccaatcaggagccagcaacgacaaccactactttggctacagcaccccctgggggtattttgacttcaacagattccactgccacttttcaccacgtgactggcaaagactcatcaacaacaactggggattccggcccaaaagactcaacttcaagctctttaatattcaagtcaaagaggtcacgcagaatgacggtacgacgacgattgccaataaccttaccagcacggttcaggtgtttactgactcggagtaccagctcccgtacgtcctgggctcggcgcatcaaggatgcctcccgccgtttccagcggacgtcttcatggtcccacagtatggatacctcaccctgaacaacgggagtcaggcggtaggacgctcttccttttactgcctggagtactttccttctcagatgctgcgtactggaaacaactttcagttcagctacacttttgaagacgtgcctttccacagcagctacgctcacagccagagtctggatcggctgatgaatcctctgatcgaccagtacctgtattatctgaacaagacacaaacaaatagtggaactcttcagcagtctcggctactgtttagccaagctggaccaaccaacatgtctcttcaagctaaaaactggctgcctggaccttgctacagacagcagcgtctgtcaaaacaggcaaacgacaacaacaacagcaactttccctggactgcagctacaaagtatcatctaaatggccgggactcgttggttaatccaggaccagctatggccagtcacaaggatgacgaagaaaagtttttccccatgcatggaaccctgatatttggtaaacaaggaacaaatgccaacgacgcggatttggaaaatgtcatgattacagatgaagaagaaatcagggccaccaatcccgtggctacggagcagtacgggactgtgtcaaataatttgcaaaactcaaacactggtccaactactggaactgtcaatcgccaaggagcgttacctggtatggtgtggcaggatcgagacgtgtacctgcagggacccatttgggccaagattcctcacaccgatggacactttcatccttctccactgatgggaggttttggactcaaacacccgcctcctcagatcatgatcaaaaacactcccgttccagccaatcctcccacaaacttcagttctgccaagtttgcttctttcatcacacagtattccacgggacaggtcagcgtggagatcgagtgggagctgcagaaggagaacagcaaacgctggaatcccgaaattcagtacacttccaactacaacaagtctgttaatgtggactttactgtggacactaatggtgtgtattcagagcctcgccccattggcaccagatacctgactcgtaatctgtaat

SEQ ID NO: 209 - protein, 735 aa, Adeno-associated virus
MAADGYPPDWLEDTLSEGIRQWWKLKPGPPPPKPAERHKDDSRGLVLPGYKYLGPFNGLDKGEPVNEADAAALEHDKAYDRQLDSGDNPYLKYNHADAEFQERLKEDTSFGGNLGRAVFQAKKRVLEPLGLVEEPVKTAPGKKRPVEHSPVEPDSSSGTGKAGQRPARKRLNFGQTGDADSVPDPQPLGQPPAAPSGLGSTTMATGSGAPMADNNEGADGVGNSSGNWHCDSQWLGDRVITTSTRTWALPTYNNHLYKQISSQSGASNDNHYFGYSTPWGYFDFNRFHCHFSPRDWQRLINNNWGFRPKRLNFKLFNIQVKEVTQNDGTTTIANNLTSTVQVFTDSEYQLPYVLGSAHQGCLPPFPADVFMVPQYGYLTLNNGSQAVGRSSFYCLEYFPSQMLRTGNNFQFSYTFEDVPFHSSYAHSQSLDRLMNPLIDQYLYYLNKTQTNSGTLQQSRLLFSQAGPTNMSLQAKNWLPGPCYRQQRLSKQANDNNNSNFPWTAATKYHLNGRDSLVNPGPAMASHKDDEEKFFPMHGTLIFGKQGTNANDADLENVMITDEEEIRATNPVATEQYGTVSNNLQNSNTGPTTGTVNRQGALPGMVWQDRDVYLQGPIWAKIPHTDGHFHPSPLMGGFGLKHPPPQIMIKNTPVPANPPTNFSSAKFASFITQYSTGQVSVEIEWELQKENSKRWNPEIQYTSNYNKSVNVDFTVDTNGVYSEPRPIGTRYLTRNL

SEQ ID NO: 210 - DNA, 2208 bp, Adeno-associated virus
atggctgccgatggttatcttccagattggctcgaggacactctctctgaaggaataagacagtggtggaagctcaaacctggcccaccaccaccaaagcccgcagagcggcataaggacgacagcaggggtcttgtgcttcctgggtacaggtacctcggacccttcaacggactcgacaagggagagccggtcaacgaggcagacgccgcggccctcgagcacgacaaggcctacgaccggcagctcgacagcggagacaacccgtacctcaagtacaaccacgtcgacgcggagtttcaggagcgtcttaaagaagatacgtcttttgggggcaacctcggacgagcagtcttccaggccaaaaagaggattcttgaacctctgggcctggttgaggaacctgttaaggcggctccgggagaaaagaggccggtagagcactctcctgcggagccagactcctcctcgggaaccggaaaagcgggccagcagcctgcaagaaagagattgaattttggtcagactggagacgcagactcagtacctgacccccagcctctcggacagccaccagcagccccctctggtctgggaactaatacgatggcttcaggcagtggcgcaccaatggcagacaataacgagggcgccgacggagtgggtaattcctcgggaaattggcattgcgattccacatggatgggcgacagagtcatcaccaccagcacccgcacctgggccctgcccacctacaacaaccatctgtacaagcaaatctccagccagtctggagccagcaacgacaaccactactttggctacagcaccccctgggggcattttgacttcaacagattccactgccacttctccccacgtgactggcaaagactcatcaacaacaactggggattccggcccaagagactcagcttcaagctctttaacattcaagtcaaagaggtcacgcagaatgacggtacgacgacgattgccaataaccttaccagcacggttcaggtgtttactgactcggagtaccagctcccgtacgtcctcggctcggcgcatcaaggatgcctcccgccgttcccagcagacgtcttcatggtgccacagtatggatacctcaccctgaacaacggcagtcaggcggtaggacgctcttccttttactgcctggagtactttccttctcagatgcttcgtaccggaaacaactttaccttcagctacacctttgaagacgttcctttccatagcagctacgctcacagccaaagtctggaccgtctcatgaatcctctcatcgaccagtacctgtattacttgagcagaacaaacactccaagcggaaccaccacgatgtccaggcttcagttttctcaggccggagcaagtgacattcgggaccagtctagaaactggcttcctggaccctgttaccgccagcagcgagtatcaaagacagctgcggacaacaacaacagtgattactcgtggactggagctaccaagtaccacctcaatggaagagactctctggtgaatccgggcccagctatggccagccacaaggacgatgaagaaaaatattttcctcagagcggggttctcatctttggaaaacaagactcgggaaaaactaatgtggacattgaaaaggttatgattacagacgaagaggaaatcaggaccaccaatcccgtggctacggagcagtatggttctgtatctaccaacctccagagcggcaacacacaagcagctacctcagatgtcaacacacaaggcgttcttccaggcatggtctggcaggacagagacgtgtacctgcaggggcccatctgggcaaagattccacacacggacggacattttcacccctctccccccatgggcggattcggacttaaacaccctcctccacaaattctcatcaagaacaccccggtacctgcgaatccttcgaccactttcagtgcggcaaagtttgcttccttcatcacacagtactccacggggcaggtcagcgtggagatcgagtgggagctgcagaaggagaacagcaaacgctggaatcccgaaattcagtacacttccaactacaacaaatctgttaatgtggactttactgtggacactaatggtgtgtattcagagcctcgccccattggcgccagatacctgactcgtaatctgtaa

SEQ ID NO: 211 - protein, 735 aa, Adeno-associated virus
MAADGYLPDWLEDTLSEGIRQWWKLKPGPPPPKPAERHKDDSRGLVLPGYRYLGPFNGLDKGEPVNEADAAALEHDKAYDRQLDSGDNPYLKYNHVDAEFQERLKEDTSFGGNLGRAVFQAKKRILEPLGLVEEPVKAAPGEKRPVEHSPAEPDSSSGTGKAGQQPARKRLNFGQTGDADSVPDPQPLGQPPAAPSGLGTNTMASGSGAPMADNNEGADGVGNSSGNWHCDSTWMGDRVITTSTRTWALPTYNNHLYKQISSQSGASNDNHYFGYSTPWGHFDFNRFHCHFSPRDWQRLINNNWGFRPKRLSFKLFNIQVKEVTQNDGTTTIANNLTSTVQVFTDSEYQLPYVLGSAHQGCLPPFPADVFMVPQYGYLTLNNGSQAVGRSSFYCLEYFPSQMLRTGNNFTFSYTFEDVPFHSSYAHSQSLDRLMNPLIDQYLYYLSRTNTPSGTTTMSRLQFSQAGASDIRDQSRNWLPGPCYRQQRVSKTAADNNNSDYSWTGATKYHLNGRDSLVNPGPAMASHKDDEEKYFPQSGVLIFGKQDSGKTNVDIEKVMITDEEEIRTTNPVATEQYGSVSTNLQSGNTQAATSDVNTQGVLPGMVWQDRDVYLQGPIWAKIPHTDGHFHPSPPMGGFGLKHPPPQILIKNTPVPANPSTTFSAAKFASFITQYSTGQVSVEIEWELQKENSKRWNPEIQYTSNYNKSVNVDFTVDTNGVYSEPRPIGARYLTRNL

SEQ ID NO: 212 - DNA, 2208 bp, Adeno-associated virus
atggctgccgatggttatcttccagattggctcgaggacaccctctctgaaggaataagacagtggtggaagctcaaacctggcccaccaccaccaaagcccgcagagcggcataaggacgacagcaggggtcttgtgcttcctgggtacaagtacctcggacccttcaacggactcgacaagggagagccggtcaacgaggcagacgccgcggccctcgagcacgacaaggcctacgaccggcagctcgacagcggagataacccgtacctcaagtacaaccacgccgacgcggagtttcaggagcgccttaaagaggatacgtcttttgggggcaacctcggacgagcagtcttccaggccaaaaagaggattcttgaacctctgggcctggttgaggaacctgttaagacggctccgggaaaaaagaggccggtagagcactctcctgcggagccagactcctcctcgggaaccggaaaagcgggccagcagcctgcaagaaagagattgaattttggtcagactggagacgcagactcagtacctgacccccggcctctcggacagccaccagcagccccctctggtctgggaactaatacgatggcttcaggcagtggcgcaccaatggcagacaataacgagggcgccgacggagtgggtaattcctcgggaaattggcattgcgattccacatggatgggcgacagagtcatcaccaccagcacccgcacctgggccctgcccacctacaacaaccatctgtacaagcaaatctccagccagtctggagccagcaacgacaaccactactttggctacagcaccccctgggggtattttgacttcaacagattccactgccacttctccccacgtgactggcaaagactcatcaacaacaactggggattccggcccaagagactcagcttcaagctctttaacattcaagtcaaagaggtcacgcagaatgacggtacgacgacgattgccaataaccttaccagcacggttcaggtgtttactgactcggagtaccagctcccgtacgtcctcggctcggcgcatcaaggatgcctcccgccgttcccagcagacgtcttcatggtgccacagtatggatacctcaccctgaacaacggcagtcaggcggtaggacgctcttccttttactgcctggagtactttccttctcagatgcttcgtaccggaaacaactttaccttcagctacacctttgaagacgttcctttccatagcagctacgctcacagccaaagtctggaccgtctcatgaatcctctcatcgaccagtacctgtattacttgagcagaacaaacactccaagcggaaccaccacgatgtccaggcttcagttttctcaggccggagcaagtgacattcgggaccagtctagaaactggcttcctggaccctgttaccgccagcagcgagtatcaaagacagctgcggacaacaacaacagtgattactcgtggactggagctaccaagtaccacctcaatggaagagactctctggtgaatccgggcccagctatggccagccacaaggacgatgaagaaaaatattttcctcagagcggggttctcatctttggaaaacaagactcgggaaaaactaatgtggacattgaaaaggttatgattacagacgaagaggaaatcaggaccaccaatcccgtggctacggagcagtatggttctgtatctaccaacctccagagcggcaacacacaagcagctacctcagatgtcaacacacaaggcgttcttccaggcatggtctggcaggacagagacgtgtacctgcaggggcccatctgggcaaagattccacacacggacggacattttcacccctctcccctcatgggcggattcggacttaaacaccctcctccacaaattctcatcaagaacaccccggtacctgcgaatccttcgaccactttcagtgcggcaaagtttgcttccttcatcacacagtactccacggggcaggtcagcgtggagatcgagtgggagctgcagaaggagaacagcaaacgctggaatcccgaaattcagtacacttccaactacaacaaatctgttaatgtggactttactgtggacactaatggtgtgtattcagagcctcgccccattggcaccagatacctgactcgtaatctgtaa

SEQ ID NO: 213 - protein, 735 aa, Adeno-associated virus
MAADGYLPDWLEDTLSEGIRQWWKLKPGPPPPKPAERHKDDSRGLVLPGYKYLGPFNGLDKGEPVNEADAAALEHDKAYDRQLDSGDNPYLKYNHADAEFQERLKEDTSFGGNLGRAVFQAKKRILEPLGLVEEPVKTAPGKKRPVEHSPAEPDSSSGTGKAGQQPARKRLNFGQTGDADSVPDPRPLGQPPAAPSGLGTNTMASGSGAPMADNNEGADGVGNSSGNWHCDSTWMGDRVITTSTRTWALPTYNNHLYKQISSQSGASNDNHYFGYSTPWGYFDFNRFHCHFSPRDWQRLINNNWGFRPKRLSFKLFNIQVKEVTQNDGTTTIANNLTSTVQVFTDSEYQLPYVLGSAHQGCLPPFPADVFMVPQYGYLTLNNGSQAVGRSSFYCLEYFPSQMLRTGNNFTFSYTFEDVPFHSSYAHSQSLDRLMNPLIDQYLYYLSRTNTPSGTTTMSRLQFSQAGASDIRDQSRNWLPGPCYRQQRVSKTAADNNNSDYSWTGATKYHLNGRDSLVNPGPAMASHKDDEEKYFPQSGVLIFGKQDSGKTNVDIEKVMITDEEEIRTTNPVATEQYGSVSTNLQSGNTQAATSDVNTQGVLPGMVWQDRDVYLQGPIWAKIPHTDGHFHPSPLMGGFGLKHPPPQILIKNTPVPANPSTTFSAAKFASFITQYSTGQVSVEIEWELQKENSKRWNPEIQYTSNYNKSVNVDFTVDTNGVYSEPRPIGTRYLTRNL

SEQ ID NO: 214 - DNA, 2208 bp, Adeno-associated virus
atggctgccgatggttatcttccagattggctcgaggacactctctctgaaggaataagacagtggtggaagctcaaacctggcccaccaccaccaaagcccgcagagcggcataaggacgacagcaggggtcttgtgcttcctgggtacaagtacctcggacccttcaacggactcgacaagggagagccggtcaacgaggcagacgccgcggccctcgagcacgacaaggcctacgaccggcagctcgacagcggagacaacccgtacctcaagtacaaccacgccgacgcggagtttcaggagcgccttaaaggagatacgtcttttgggggcaacctcggacgagcagtcttccaggccaaaaagaggattcttgaacctctgggcctggttgaggaacctgttaagacggctccgggaaaaaagaggccggtagagcactctcctgcggagccagactcctcctcgggaaccggaaaagcgggccagcagcctgcaagaaagagattgaattttggtcagactggagacgcagactcagtacctgacccccagcctctcggacagccaccagcagccccctctggtctgggaactaatacgatggcttcaggcagtggcgcaccaatggcagacaataacgagggcgccgacggagtgggtaattcctcgggaaattggcattgcgattccacatggatgggcggcagagtcatcaccaccagcacccgcacctgggccctgcccacctacaacaaccatctgtacaagcaaatctccagccagtctggagccagcaacgacaaccactactttggctacagcaccccctgggggtattttgacttcaacagattccactgccacttctccccacgtgactggcaaagactcatcaacaacaactggggattccggcccaagagactcagcttcaagctctttaacattcaagtcaaagaggtcacgcagaatgacggtacgacgacgattgccaataaccttaccagcacggttcaggtgtttactgactcggagtaccagctcccgtacgtcctcggctcggcgcatcaaggatgcctcccgccgttcccagcagacgtcttcatggtgccacagtatggatacctcaccctgaacaacggcagtcaggcggtaggacgctcttccttttactgcctggagtactttccttctcagacgcttcgtaccggaaacaactttaccttcagctacacctttgaagacgttcctttccatagcagctacgctcacagccaaagtctggaccgtctcatgaatcctctcatcgaccagtacctgtattacttgagcagaacaaacactccaagcggaaccaccacgatgtccaggcttcagttttctcaggccggagcaagtgacattcgggaccagtctagaaactggcttcctggaccctgttaccgccagcagcgagtatcaaagacagctgcggacaacaacaacagtgattactcgtggactggagctaccaagtaccacctcaatggaagagactctctggtgaatccgggcccagctatggccagccacaaggacgatgaagaaaaatattttcctcagagcggggttctcatctttggaaaacaagactcgggaaaaactaatgtggacattgaaaaggttatgattacagacgaagaggaaatcaggaccaccaatcccgtggctacggagcagtatggttctgtatctaccaacctccagagcggcaacacacaagcagctacctcagatgtcaacacacaaggcgttcttccaggcatggtctggcaggacagagacgtgtacctgcaggggcccatctgggcaaagattccacacacggacggacattttcacccctctcccctcatgggcggattcggacttaaacaccctcctccacaaattctcatcaagaacaccccggtacctgcgaatccttcgaccactttcagtgcggcaaagtttgcttccttcatcacacagtactccacggggcaggtcagcgtggagatcgagtgggagctgcagaaggagaacagcaaacgctggaatcccgaaattcagtacacttccaactacaacaaatctgttaatgtggactttactgtggacactaatggtgtgtattcagagcctcgccccattggcaccagatacctgactcgtaatctgtaa

SEQ ID NO: 215 - protein, 735 aa, Adeno-associated virus
MAADGYLPDWLEDTLSEGIRQWWKLKPGPPPPKPAERHKDDSRGLVLPGYKYLGPFNGLDKGEPVNEADAAALEHDKAYDRQLDSGDNPYLKYNHADAEFQERLKGDTSFGGNLGRAVFQAKKRILEPLGLVEEPVKTAPGKKRPVEHSPAEPDSSSGTGKAGQQPARKRLNFGQTGDADSVPDPQPLGQPPAAPSGLGTNTMASGSGAPMADNNEGADGVGNSSGNWHCDSTWMGGRVITTSTRTWALPTYNNHLYKQISSQSGASNDNHYFGYSTPWGYFDFNRFHCHFSPRDWQRLINNNWGFRPKRLSFKLFNIQVKEVTQNDGTTTIANNLTSTVQVFTDSEYQLPYVLGSAHQGCLPPFPADVFMVPQYGYLTLNNGSQAVGRSSFYCLEYFPSQTLRTGNNFTFSYTFEDVPFHSSYAHSQSLDRLMNPLIDQYLYYLSRTNTPSGTTTMSRLQFSQAGASDIRDQSRNWLPGPCYRQQRVSKTAADNNNSDYSWTGATKYHLNGRDSLVNPGPAMASHKDDEEKYFPQSGVLIFGKQDSGKTNVDIEKVMITDEEEIRTTNPVATEQYGSVSTNLQSGNTQAATSDVNTQGVLPGMVWQDRDVYLQGPIWAKIPHTDGHFHPSPLMGGFGLKHPPPQILIKNTPVPANPSTTFSAAKFASFITQYSTGQVSVEIEWELQKENSKRWNPEIQYTSNYNKSVNVDFTVDTNGVYSEPRPIGTRYLTRNL

SEQ ID NO: 216 - DNA, 2208 bp, Adeno-associated virus
atggctgccgatggttatcttccagattggctcgaggacactctctctgaaggaataagacagtggtggaagctcaaacctggcccaccaccaccaaagcccgcagagcggcataaggacgacagcaggggtcttgtgcttcctgggtacaagtacctcggacccttcaacggactcgacaagggagagccggtcaacgaggcagacgccgcggccctcgagcacgacaaggcctacgaccggcagctcgacagcggagacaacccgtacctcaagtacaaccacgccgacgcggagtttcaggagcgtcttaaagaagatacgtcttttgggggcaacctcggacgagcagtcttccaggccaaaaagaggattcttgaacctctgggcctggttgaggaacctgttaagacggctccgggaaaaaagaggccggtagagcactctcctgcggagccagactcctcctcgggaaccggaaaagcgggccagcagcctgcaagaaagagattgaattttggtcagactggagacgcagactcagtacctgacccccagcctctcggacagccaccagcagccccctctggtctgggaactaatacgatggcttcaggcagtggcgcaccaatggcagacaataacgagggcgccgacggagtgggtaattcctcgggaaattggcattgcgattccacatggatgggcgacagagtcatcaccaccagcacccgcacctgggccctgcccacctgcaacaaccatctgtacaagcaaatctccagccagtctggagccagcaacgacaaccactactttggctacagcaccccctgggggtattttgacttcaacagattccactgccacttctccccacgtgactggcaaagactcatcaacaacaactggggattccggcccaagagactcagcttcaagctctttaacattcaagtcaaagaggtcacgcagaatgacggtacgacgacgattgccaataaccttaccagcacggttcaggtgtttactgactcggagtaccagctcccgtacgtcctcggctcggcgcatcaaggatgcctcccgccgttcccagcagacgtcttcatggtgccacagtatggatacctcaccctgaacaacggcagtcaggcggtaggacgctcttccttttactgcctggagtattttccttctcagatgcttcgtaccggaaacaactttaccttcagctacacctttgaagacgttcctttccatagcagctacgctcacagccaaagtctggaccgtctcatgaatcctctcatcgaccagtacctgtattacttgagcagaacaaacactccaagcggaaccaccacgatgtccaggcttcagttttctcaggccggagcaagtgacattcgggaccagtctagaaactggcttcctggaccctgttaccgccagcagcgagtatcaaagacagctgcggacaacaacaacagtgattactcgtggactggagctaccaagtaccacctcaatggaagagactctctggtgaatccgggcccagctatggccagccacaaggacgatgaagaaaaatattttcctcagagcggggttctcatctttggaaaacaagactcgggaaaaactaatgtggacattgaaaaggttatgattacagacgaagaggaaatcaggaccaccaatcccgtggctacggagcagtatggttctgtatctacctacctccagagcggcaacacacaagcagctacctcagatgtcaacacacaaggcgttcttccaggcatggtctggcaggacagagacgtgtacctgcgggggcccatctgggcaaagattccacacacggacggacattttcacccctctcccctcatgggcggatttggacttaaacaccctcctccacaaattctcatcaagaacaccccggtacctgcgaatccttcgaccactttcagtgcggcaaagtttgcttccttcatcacacagtactccacggggcaggtcagcgtggagatcgagtgggagctgcagaaggagaacagcaaacgctggaatcccgaaattcagtacacttccaactacaacaaatctgttaatgtggactttactgtggacactaatggtgtgtattcagagcctcgccccattggcaccagatacctgactcgtaatctgtaa

SEQ ID NO: 217 - protein, 735 aa, Adeno-associated virus
MAADGYLPDWLEDTLSEGIRQWWKLKPGPPPPKPAERHKDDSRGLVLPGYKYLGPFNGLDKGEPVNEADAAALEHDKAYDRQLDSGDNPYLKYNHADAEFQERLKEDTSFGGNLGRAVFQAKKRILEPLGLVEEPVKTAPGKKRPVEHSPAEPDSSSGTGKAGQQPARKRLNFGQTGDADSVPDPQPLGQPPAAPSGLGTNTMASGSGAPMADNNEGADGVGNSSGNWHCDSTWMGDRVITTSTRTWALPTCNNHLYKQISSQSGASNDNHYFGYSTPWGYFDFNRFHCHFSPRDWQRLINNNWGFRPKRLSFKLFNIQVKEVTQNDGTTTIANNLTSTVQVFTDSEYQLPYVLGSAHQGCLPPFPADVFMVPQYGYLTLNNGSQAVGRSSFYCLEYFPSQMLRTGNNFTFSYTFEDVPFHSSYAHSQSLDRLMNPLIDQYLYYLSRTNTPSGTTTMSRLQFSQAGASDIRDQSRNWLPGPCYRQQRVSKTAADNNNSDYSWTGATKYHLNGRDSLVNPGPAMASHKDDEEKYFPQSGVLIFGKQDSGKTNVDIEKVMITDEEEIRTTNPVATEQYGSVSTYLQSGNTQAATSDVNTQGVLPGMVWQDRDVYLRGPIWAKIPHTDGHFHPSPLMGGFGLKHPPPQILIKNTPVPANPSTTFSAAKFASFITQYSTGQVSVEIEWELQKENSKRWNPEIQYTSNYNKSVNVDFTVDTNGVYSEPRPIGTRYLTRNL

SEQ ID NO: 218 - DNA, 2208 bp, Adeno-associated virus; identical to SEQ ID NO: 212

SEQ ID NO: 219 - protein, 735 aa, Adeno-associated virus; identical to SEQ ID NO: 213

SEQ ID NO: 220 - DNA, 2208 bp, Adeno-associated virus
atggctgccgatggttatcttccagattggctcgaggacactctctctgaaggaataagacagtggtggaagctcaaacctggcccaccaccaccaaagcccgcagagcggcataaggacggcagcaggggtcttgtgcttcctgggtacaagtacctcggacccttcaacggactcgacaagggagagccggtcaacgaggcagacgccgcggccctcgagcacgacaaggcctacgaccggcagctcaacagcggagacaacccgtacctcaagtacaaccacgccgacgcggagtttcaggagcgccttaaagaagatacgtcttttgggggcaacctcggacgagcagtcttccaggcaaaaaagagggttcttgaacctctgggcctggttgaggagcctgttaaaacggctccgggaaaaaagagaccggtagagcactctcctgcggagccagactcctcctcgggaaccggaaaagcgggccagcagcctgcaagaaagagattgaattttggtcagactggagacgcagactccgtacctgacccccagcctctcggacagccaccagcagccccctctggtctgggatctactacaatggctacaggcagtggcgcaccaatggcagacaataacgagggtgccgatggagtgggtaattcctcaggaaattggcattgcgattcccaatggctgggcgacagagtcatcaccacaagcactcgaacctgggccctgcccacctacaacaaccacctctacaagcaaatctccagccaatcaggagcctcaaacgacaaccactattttggctacagcaccccttgggggtattttgacttcaacagattccactgccacttttcaccacgtgactggcaaagactcatcaacaacaactggggattccgacccaagagactcaacttcaagctctttaacattcaagtcaaagaggtcacgcagaatgacggtacgacgacgattgccaataaccttaccagcacggttcaggtgtttactgactcggagtaccagctcccgtacgtcctcggctcggcgcatcaaggatgcctcccgccgttcccagcggacgtcttcatggtcccacagtatggatacctcaccctgaacaacgggagtcaggcggtaggacgctctcccttttactgcctggagtactttccttctcagatgctgcgtactggaaacaactttcagttcagctacacttttgaagacgtgcctttccacagcagctacgctcacagccagagtctggatcggctgatgaatcctctgatcgaccagtacctgtattatctgaacaagacacaaacaaatagtggaactcttcagcagtctcggctactgtttagccaagctggacccaccaacatgtctcttcaagctaaaaactggctgcctggaccttgctacagacagcagcgtctgtcaaagcaggcaaacgacaacaacaacagcaactttccctggactgcagctacaaagtatcatctaaatggccgggactcgttggttaatccaggaccagctatggccagtcacaaggatgacgaagaaaagtttttccccatgcatggaaccctgatatttggtaaacaaggaacaaatgccaacgacgcggatttggaaaatgtcatgattacagatgaagaagaaatcaggaccaccaatcccgtggctacggagcagtacgggactgtgtcaaataatttgcaaaactcaaacactggtccaactactggaactgtcaatcaccaaggagcgttacctggtatggtgtggcaggatcgagatgtgtaccttcagggacccatttgggccaagattcctcacaccgatggacactttcatccttctccactgatgggaggttttggactcaaacacccgcctcctcagattatgatcaaaaacactcccgttccagccaatcctcctacaaacttcagttctgccaagtttgcttctttcatcacacagtattccacggggcaggtcagcgtggagatcgagtgggagctgcagaaggagaacagcaaacgctggaatcccgaaattcagtacacttccaactacaacaaatctgttaatgtggactttactgtggacaataatggcgtgtactcagagcctcgccccattggcaccagatacctgactcgtaatctgtaa

SEQ ID NO: 221 - protein, 735 aa, Adeno-associated virus
MAADGYLPDWLEDTLSEGIRQWWKLKPGPPPPKPAERHKDGSRGLVLPGYKYLGPFNGLDKGEPVNEADAAALEHDKAYDRQLNSGDNPYLKYNHADAEFQERLKEDTSFGGNLGRAVFQAKKRVLEPLGLVEEPVKTAPGKKRPVEHSPAEPDSSSGTGKAGQQPARKRLNFGQTGDADSVPDPQPLGQPPAAPSGLGSTTMATGSGAPMADNNEGADGVGNSSGNWHCDSQWLGDRVITTSTRTWALPTYNNHLYKQISSQSGASNDNHYFGYSTPWGYFDFNRFHCHFSPRDWQRLINNNWGFRPKRLNFKLFNIQVKEVTQNDGTTTIANNLTSTVQVFTDSEYQLPYVLGSAHQGCLPPFPADVFMVPQYGYLTLNNGSQAVGRSPFYCLEYFPSQMLRTGNNFQFSYTFEDVPFHSSYAHSQSLDRLMNPLIDQYLYYLNKTQTNSGTLQQSRLLFSQAGPTNMSLQAKNWLPGPCYRQQRLSKQANDNNNSNFPWTAATKYHLNGRDSLVNPGPAMASHKDDEEKFFPMHGTLIFGKQGTNANDADLENVMITDEEEIRTTNPVATEQYGTVSNNLQNSNTGPTTGTVNHQGALPGMVWQDRDVYLQGPIWAKIPHTDGHFHPSPLMGGFGLKHPPPQIMIKNTPVPANPPTNFSSAKFASFITQYSTGQVSVEIEWELQKENSKRWNPEIQYTSNYNKSVNVDFTVDNNGVYSEPRPIGTRYLTRNL

SEQ ID NO: 222 - DNA, 2208 bp, Adeno-associated virus
atggctgccgatggttatcttccagattggctcgaggacactctctctgaaggaataagacagtggtggaagctcaaacctggcccaccaccaccaaagcccgcagagcggcataaggacgacagcaggggtcttgtgcttcctgggtacaagtacctcggacccttcaacggactcgacaagggagagccggtcaacgaggcagacgccgcggccctcgagcacgacaaggcctacgaccggcagctcgacagcggagacaacccgtacctcaagtacaaccacgccgacgcggagtttcaggagcgtcttaaagaagatacgtcttttgggggcaacctcggacgagcagtcttccaggccaaaaagaggattcttgaacctctgggcctggttgaggaacctgttaagacggctccgggaaaaaagaggccggtagagcactctcctgcggagccagactcctcctcgggaaccggaaaagcgggccagcagcctgcaagaaagagattgaattttggtcagactggagacgcagactcagtacctgacccccagcctctcggacagccaccagcagccccctctggtctgggaactaatacgatggcttcaggcagtggcgcaccaatggcagacaataacgagggcgccgacggagtgggtaattcctcgggaaattggcattgcgattccacatggatgggcgacagagtcatcaccaccagcacccgcacctgggccctgcccacctacaacaaccatctgtacaagcaaatctccagccagtctggagccagcaacgacaaccactactttggctacagcaccccctgggggtattttgacttcaacagattccactgccacttctccccacgtgactggcaaagactcatcaacaacaactggggattccggcccaagagactcagcttcaagctctttaacattcaagtcaaagaggtcacgcagaatgacggtacgacgacgattgccaataaccttaccagcacggttcaggtgtttactgactcggagtaccagctcccgtacgtcctcggctcggcgcatcaaggatgcctcccgccgttcccagcagacgtcttcatggtgccacagtatggatacctcaccctgaacaacggcagtcaggcggtaggacgctcttccttttactgcctggagtactttccttctcagatgcttcgtaccggaaacaactttaccttcagctacacctttgaagacgttcctttccatagcagctacgctcacagccaaagtctggaccgtctcatgaatcctctcatcgaccagtacctgtattacttgagcagaacaaacactccaagcggaaccaccacgatgtccaggcttcagttttctcaggccggagcaagtgacattcgggaccagtctagaaactggcttcctggaccctgttaccgccagcagcgagtatcaaagacagctgcggacaacaacaacagtgattactcgtggactggagctaccaagtaccacctcaatggaagagactctctggtgaatccgggcccagctatggccagccacaaggacgatgaagaaaaatattttcctcagagcggggttctcatctttggaaaacaagactcgggaaaaactaatgtggacattgaaaaggttatgattacagacgaagaggaaatcaggaccaccaatcccgtggctacggagcagtatggttctgtatctaccaacctccagagcggcaacacacaagcagctacctcagatgtcaacacacaaggcgttcttccaggcatggtctggcaggacagagacgtgtacctgcaggggcccatctgggcaaagattccacacacggacggacattttcacccctctcccctcatgggcggattcggacttaaacaccctcctccacaaattctcatcaagaacaccccggtacctgcgaatccttcgaccactttcagtgcggcaaagtttgcttccttcatcacacagtactccacggggcaggtcagcgtggagatcgagtgggagctgcagaaggagaacagcaaacgctggaatcccgaaattcagtacacttccaactacaacaaatctgttaatgtggactttactgtggacactaatggtgtgtattcagagcctcgccccattggcaccagatacctgactcgtaatctgtaa

SEQ ID NO: 223 - protein, 735 aa, Adeno-associated virus
MAADGYLPDWLEDTLSEGIRQWWKLKPGPPPPKPAERHKDDSRGLVLPGYKYLGPFNGLDKGEPVNEADAAALEHDKAYDRQLDSGDNPYLKYNHADAEFQERLKEDTSFGGNLGRAVFQAKKRILEPLGLVEEPVKTAPGKKRPVEHSPAEPDSSSGTGKAGQQPARKRLNFGQTGDADSVPDPQPLGQPPAAPSGLGTNTMASGSGAPMADNNEGADGVGNSSGNWHCDSTWMGDRVITTSTRTWALPTYNNHLYKQISSQSGASNDNHYFGYSTPWGYFDFNRFHCHFSPRDWQRLINNNWGFRPKRLSFKLFNIQVKEVTQNDGTTTIANNLTSTVQVFTDSEYQLPYVLGSAHQGCLPPFPADVFMVPQYGYLTLNNGSQAVGRSSFYCLEYFPSQMLRTGNNFTFSYTFEDVPFHSSYAHSQSLDRLMNPLIDQYLYYLSRTNTPSGTTTMSRLQFSQAGASDIRDQSRNWLPGPCYRQQRVSKTAADNNNSDYSWTGATKYHLNGRDSLVNPGPAMASHKDDEEKYFPQSGVLIFGKQDSGKTNVDIEKVMITDEEEIRTTNPVATEQYGSVSTNLQSGNTQAATSDVNTQGVLPGMVWQDRDVYLQGPIWAKIPHTDGHFHPSPLMGGFGLKHPPPQILIKNTPVPANPSTTFSAAKFASFITQYSTGQVSVEIEWELQKENSKRWNPEIQYTSNYNKSVNVDFTVDTNGVYSEPRPIGTRYLTRNL

SEQ ID NO: 224 - DNA, 2208 bp, Adeno-associated virus
atggctgccgatggttatcttccagattggctcgaggacactctctctgaaggaataagacagtggtggaagctcaaacctggcccaccaccaccaaagcccgcagagcggcataaggacgacagcaggggtcttgtgcttcctgggtacaagtacctcggacccttcaacggactcgacaagggagagccggtcaacgaggcagacgccgcggccctcgagcacgacaaggcctacgaccggcagctcgacagcggagacaacccgtacctcaagtacaaccacgccgacgcggagtttcaggagcgtcttaaagaagatacgtcttttgggggcaacctcggacgagcagtcttccaggccaaaaagaggattcttgaacctctgggcctggttgaggaacctgttaagacggctccgggaaaaaagaggccggtagagcactctcctgcggagccagactcctcctcgggaaccggaaaagcgggccagcagcctgcaagaaagagattgaattttggtcagactggagacgcagactcagtacctgacccccagcctctcggacagccaccagcagccccctctggtctgggaactaatacgatggcttcaggcagtggcgcaccaatggcagacaataacgagggcgccgacggagtgggtaattcctcgggaaattggcattgcgattccacatggatgggcgacagagtcatcaccaccagcacccgcacctgggccctgcccacctacaacaaccatctgtacaagcaaatctccagccagtctggagccagcaacgacaaccactactttggctacagcaccccctgggggtatttcgacttcaacagattccactgccacttctccccacgtgactggcaaagactcatcaacaacaactggggattccggcccaagagactcagcttcaagctctttaacattcaagtcaaagaggtcacgcagaatgacggtacgacgacgattgccaataaccttaccagcacggttcaggtgtttactgactcggggtaccagctcccgtacgtcctcggctcggcgcatcaaggatgccttccgccgttcccagcagacgtcttcatggtgccacagtatggatacctcaccctgaacaacggcagtcaggcggtaggacgctcttccttttactgcctggagtactttccttctcagatgcttcgtaccggaaacaactttaccttcagctacacctttgaagacgttcctttccatagcagctacgctcacggccaaagtctggaccgtctcatgaatcctctcatcgaccagtacctgtattacttgagcagaacaaacactccaagcggaaccaccacgatgtccaggcttcagttttctcaggccggagcaagtgacgttcgggaccagtctagaaactggcttcctggaccctgttaccgccagcagcgagtatcaaagacagctgcggacaacaacaacagtgattactcgtggactggagctaccaagtaccacctcaatggaagagactctctggtgaatccgggcccagctatggccagccacaaggacgatgaagaaaaatattttcctcagagcggggttctcgtctttggaaaacaagactcgggaaaaactaatgtggacattgaaaaggttatgattacagacgaagaggaaatcaggaccaccaatcccgcggctacggagcagtatggttctgtatctaccaacctccagagcggcaacacacaagcagctacctcagatgtcaacacacaaggcgttcttccaggcatggtctggcaggacagagacgtgtacctgcaggggcccatctgggcaaagattccacacacggacggacattttcacccctctcccctcatgggcggattcggacttaaacaccctcctccacaaattctcatcaagaacaccccggtacctgcgaatccttcgaccactttcagtgcggcaaagtttgtttccttcatcacacagtactccacggggcaggtcagcgtggagatcgagtgggagctgcagaaggagaacagcaaacgctggaatcccgaaattcagtacacttccaactacaacaaatctgttaatgtggactttactgtggacactaatggtgtgtattcagagcctcgccccattggcaccagatacctgactcgtaatctgtaa

SEQ ID NO: 225 - protein, 735 aa, Adeno-associated virus
MAADGYLPDWLEDTLSEGIRQWWKLKPGPPPPKPAERHKDDSRGLVLPGYKYLGPFNGLDKGEPVNEADAAALEHDKAYDRQLDSGDNPYLKYNHADAEFQERLKEDTSFGGNLGRAVFQAKKRILEPLGLVEEPVKTAPGKKRPVEHSPAEPDSSSGTGKAGQQPARKRLNFGQTGDADSVPDPQPLGQPPAAPSGLGTNTMASGSGAPMADNNEGADGVGNSSGNWHCDSTWMGDRVITTSTRTWALPTYNNHLYKQISSQSGASNDNHYFGYSTPWGYFDFNRFHCHFSPRDWQRLINNNWGFRPKRLSFKLFNIQVKEVTQNDGTTTIANNLTSTVQVFTDSGYQLPYVLGSAHQGCLPPFPADVFMVPQYGYLTLNNGSQAVGRSSFYCLEYFPSQMLRTGNNFTFSYTFEDVPFHSSYAHGQSLDRLMNPLIDQYLYYLSRTNTPSGTTTMSRLQFSQAGASDVRDQSRNWLPGPCYRQQRVSKTAADNNNSDYSWTGATKYHLNGRDSLVNPGPAMASHKDDEEKYFPQSGVLVFGKQDSGKTNVDIEKVMITDEEEIRTTNPAATEQYGSVSTNLQSGNTQAATSDVNTQGVLPGMVWQDRDVYLQGPIWAKIPHTDGHFHPSPLMGGFGLKHPPPQILIKNTPVPANPSTTFSAAKFVSFITQYSTGQVSVEIEWELQKENSKRWNPEIQYTSNYNKSVNVDFTVDTNGVYSEPRPIGTRYLTRNL

SEQ ID NO: 226 - DNA, 2208 bp, Adeno-associated virus
atggctgccgatggttatcttccagattggctcgaggacactctctctgaaggaataagacagtggtggaaactcaaacctggcccaccaccaccaaagcccgcagagcggcataaggacgacagcaggggtcttgtgcttcctgggtacaagtacctcggacccttcaacggactcgacaagggagagccggtcaacgaggcagacgccgcggccctcgagcacgacaaggcctacgaccggcagctcgacagcggagacaacccgtacctcaagtacaaccacgccgacgcggagtttcaggagcgccttaaagaagatacgtcttttgggggcaacctcggacgagcagtcttccaggcaaaaaagagggttctggaacctctgagcctggttgaggagcctgttaagacggctccgggaaaaaagaggccggtagagcactctcccgcagagccagattcctcctccggaactggaaagtcgggcaaccagcctgcaagaaagagattgaatttcggtcagactggagactcagactccgtacctgacccccagcctctcggacagccaccagcagccccctctggtctgggaactaatacgatggctacaggcagtggcgcaccaatggcagacaataacgagggcgccgacggagtgggtaattcctcgggaaattggcattgcgattccacatggatgggcgacagagtcatcaccaccagcacccgaacctgggccctgcccacctacaacaaccatctgtacaagcaaatatccagccagtctggagccagcaacgacaatcactactttggctacagcaccccctgggggtattttgacttcaacagattccactgccacttttcaccacgtgactggcaaagactcatcaacaacaactggggattccgacccaagagactcaacttcaagctctttaacattcaagtcaaagaggtcacgcagaatgacggtacgacgacgattgccaataaccttaccagcacggttcaggtgtttactgactcggagtaccagctcccgtacgtcctcggctcggcgcatcaaggatgcctcccgccgttcccagcagacgtcttcatggtgccacagtatggatacctcaccctgaacaacgggagtcaggcagtaggacgctcttcattttactgcctagagtactttccttctcagatgctgcgtaccggaaacaactttaccttcagctacacctttgaggacgttcctttccacagcagctacgctcacagccagagtttggaccgtctcatgaatcctctcatcgaccagtacctgtattacttgagcagaacaaacactccaagcggaaccaccacgcagtccaggcttcagttttctcaggccggagcgagtgacattcaggaccagtctaggaactggcttcctggaccctgttaccgtcagcagcgagtatcaaagacatctgcggataacaacaacagtgaatactcgtggactggagctaccaagtaccacctcaatggcagagactctctggtgaatccgggcccggccatggccagccacaaagacgatgaagaaaagttttttcctcagagcggggttcttatctttgggaagcaaggctcagagaaaacaaatgtggatattgaaaaggtcatgattacagacgaagaggaaatcaggaccaccaatcccgtggctacggagcagtatggttctgtatctaccaacctccagagcggcaacacacaagcagctaccgcagatgtcaacacacaaggcgttcttccaggcatggtcgggcaagacagagacgtgtacctgcaggggcctacttgggcaaagattccacacacggacggacattttcacccctctcccctcatgggcggatttggacttaaacaccctcctccacagattctcatcaagaacaccccggtacctgcgaatccttcgaccaccttcagtgcggcaaagtttgcttccttcattacacagtactccacggggcaggtcagcgtggagatcgagtgggagctgcagaaggagaacagcaaacgctggaatcccgagatccagtacacttccaactacaacaagtctgttaatgtggactttactgtggacactaatggcgtgtattcagagcctcgccccattggcaccagatacctgactcgtaatctgtaa

SEQ ID NO: 227 - protein, 735 aa, Adeno-associated virus
MAADGYLPDWLEDTLSEGIRQWWKLKPGPPPPKPAERHKDDSRGLVLPGYKYLGPFNGLDKGEPVNEADAAALEHDKAYDRQLDSGDNPYLKYNHADAEFQERLKEDTSFGGNLGRAVFQAKKRVLEPLSLVEEPVKTAPGKKRPVEHSPAEPDSSSGTGKSGNQPARKRLNFGQTGDSDSVPDPQPLGQPPAAPSGLGTNTMATGSGAPMADNNEGADGVGNSSGNWHCDSTWMGDRVITTSTRTWALPTYNNHLYKQISSQSGASNDNHYFGYSTPWGYFDFNRFHCHFSPRDWQRLINNNWGFRPKRLNFKLFNIQVKEVTQNDGTTTIANNLTSTVQVFTDSEYQLPYVLGSAHQGCLPPFPADVFMVPQYGYLTLNNGSQAVGRSSFYCLEYFPSQMLRTGNNFTFSYTFEDVPFHSSYAHSQSLDRLMNPLIDQYLYYLSRTNTPSGTTTQSRLQFSQAGASDIQDQSRNWLPGPCYRQQRVSKTSADNNNSEYSWTGATKYHLNGRDSLVNPGPAMASHKDDEEKFFPQSGVLIFGKQGSEKTNVDIEKVMITDEEEIRTTNPVATEQYGSVSTNLQSGNTQAATADVNTQGVLPGMVGQDRDVYLQGPTWAKIPHTDGHFHPSPLMGGFGLKHPPPQILIKNTPVPANPSTTFSAAKFASFITQYSTGQVSVEIEWELQKENSKRWNPEIQYTSNYNKSVNVDFTVDTNGVYSEPRPIGTRYLTRNL

SEQ ID NO: 228 - DNA, 2208 bp, Adeno-associated virus
atggctgccgatggttatcttccagattggctcgaggacactctctctgaaggaataagacagtggtggaagctcaaacctggcccaccaccaccaaagcccgcagagcggcataaggacgacagcaggggtcttgtgcttcctgggtacaagtacctcggacccttcaacggactcgacaagggagagccggtcaacgaggcagacgccgcggccctcgagcacgacaaggcctacgaccggcagctcgacagcggagacaacccgtacctcaagtacaaccacgccgacgcagagtttcaggagcgccttaaagaagatacgtcttttgggggcaacctcggacgagcagtcttccaggcaaaaaagagggttctggaacctctgggcctggttgaggagcctgttaagacggctccgggaaaaaagaggccggtagagcactctcctgcagagccagattcctcctccggaactggaaagtcgggcaaccagcctgcaagaaagagattgaatttcggtcagactggagactcagactccgtacctgacccccagcctctcggacagccaccagcagccccctctggtctgggaactaatacgatggctacaggcagtggcgcaccaatggcagacaataacgagggcgccgacggagtgggtaattcctcgggaaattggcattgcgattccacatggatgggcgacagagtcatcaccaccagcacccgaacctgggccctgcccacctacaacaaccatctgtacaagcaaatatccagccagtctggagccagcaacgacaatcactactttggctacagcaccccctgggggtattttgacttcaacagattccactgccacttttcaccacgtgactggcaaagactcatcaacaacaactggggattccgacccaagagactcaacttcaagctctttaacattcaagtcaaagaggtcacgcagaatgacggtacgacgacgattgccaataaccttaccagcacggttcaggtgtttactgactcggagtaccagctcccgtacgtcctcggctcggcgcatcaaggatgcctcccgccgttcccagcagacgtcttcatggtgccacagtatggatacctcaccctgaacaacgggagtcaggcagtaggacgctcttcattttactgcctagggtactttccttctcagatgctgcgtaccggaaacaactttaccttcagctacacctttgaggacgttcctttccacagcagctacgctcacagccagagtttggaccgtctcatgaatcctctcatcgaccagtacctgtattacttgagcagaacaaacactccaagcggaaccaccacgcagtccaggcttcagttttctcaggccggagcgagtgacattcgggaccagtctaggaactggcttcctggaccctgttaccgtcagcagcgagtatcaaagacatctgcggataacaacaacagtgaatactcgtggactggagctaccaagtaccacctcaatggcagagactctctggtgaatccgggcccggccatggccagccacaaagacgatgaagaaaagttttttcctcagagcggggttcttatctttgggaagcaaggcccagagaaaacaaatgtggatattgaaaaggtcatgattacagacgaagaggaaatcaggaccaccaatcccgtggctacggagcagtatggttctgtatctaccaacctccagagcggcaacacacaagcagctaccgcagatgtcaacacacaaggcgttcttccaggcatggtctggcaagacagagacgtgtacctgcaggggcctatttgggcaaagattccacacacggacggacattttcacccctctcccctcatgggcggatttggacttaaacaccctcctccacagattctcatcaagaacaccccggtacctgcgaatccttcgaccaccttcagtgcggcaaagtttgcttccttcattacacagtactccacggggcaggtcagcgtggagatcgagtgggagctgcagaaggagaacagcaaacgctggaatcccgagatccagtacacttccaactacaacaagtctgttaatgtggactttactgtggacactaatggcgtgtattcagagcctcgccccattggcaccagatacctgactcgtaatctgtaa

SEQ ID NO: 229 - protein, 735 aa, Adeno-associated virus
MAADGYLPDWLEDTLSEGIRQWWKLKPGPPPPKPAERHKDDSRGLVLPGYKYLGPFNGLDKGEPVNEADAAALEHDKAYDRQLDSGDNPYLKYNHADAEFQERLKEDTSFGGNLGRAVFQAKKRVLEPLGLVEEPVKTAPGKKRPVEHSPAEPDSSSGTGKSGNQPARKRLNFGQTGDSDSVPDPQPLGQPPAAPSGLGTNTMATGSGAPMADNNEGADGVGNSSGNWHCDSTWMGDRVITTSTRTWALPTYNNHLYKQISSQSGASNDNHYFGYSTPWGYFDFNRFHCHFSPRDWQRLINNNWGFRPKRLNFKLFNIQVKEVTQNDGTTTIANNLTSTVQVFTDSEYQLPYVLGSAHQGCLPPFPADVFMVPQYGYLTLNNGSQAVGRSSFYCLGYFPSQMLRTGNNFTFSYTFEDVPFHSSYAHSQSLDRLMNPLIDQYLYYLSRTNTPSGTTTQSRLQFSQAGASDIRDQSRNWLPGPCYRQQRVSKTSADNNNSEYSWTGATKYHLNGRDSLVNPGPAMASHKDDEEKFFPQSGVLIFGKQGPEKTNVDIEKVMITDEEEIRTTNPVATEQYGSVSTNLQSGNTQAATADVNTQGVLPGMVWQDRDVYLQGPIWAKIPHTDGHFHPSPLMGGFGLKHPPPQILIKNTPVPANPSTTFSAAKFASFITQYSTGQVSVEIEWELQKENSKRWNPEIQYTSNYNKSVNVDFTVDTNGVYSEPRPIGTRYLTRNL

SEQ ID NO: 230 - protein, 735 aa, Adeno-associated virus
MAADGYLPDWLEDTLSEGIRQWWKLKPGPPPPKPAERHKDDSRGLVLPGYKYLGPFNGLDKGEPVNEADAAALEHDKAYDRQLDSGDNPYLKYNHADAEFQERLKEDTSFGGNLGRAVFQAKKRVLEPLGLVEEPVKTAPGKKRPVEHSPAEPDSSSGTGKSGNQPARKRLNFGQTGDSDSVPDPQPLGQPPAAPSGLGTNTMATGSGAPMADNNEGADGVGNSSGNWHCDSTWMGDRVITTSTRTWALPTYNNHLYKQISSQSGASNDNHYFGYSTPWGYFDFNRFHCHFSPRDWQRLINNNWGFRPKRLNFKLFNIQVKEVTQNDGTTTIANNLTSTVQVFTDSEYQLPYVLGSAHQGCLPPFPADVFMVPQYGYLTLNNGSQAVGRSSFYCLEYFPSQMLRTGNNFTFSYTFEDVPFHSSYAHSQSLDRLMNPLIDQYLYYLSRTNTPSGTTTQSRLQFSQAGASDIRDQSRNWLPGPCYRQQRVSKTSADNNNSEYSWTGATKYHLNGRDSLVNPGPAMASHKDDEEKFFPQSGVLIFGKQGPEKTNVDIEKVMITDEEEIRTTNPVATEQYGSVSTNLQSGNTQAATADVNTQGVLPGMVWQDRDVYLQGPIWAKIPHTDGHFHPSPLMGGFGLKHPPPQILIKNTPVPANPSTTFSAAKFASFITQYSTGQVSVEIEWELQKENSKRWNPEIQYTSNYNKSVNVDFTVDTNGVYSEPRPIGTRYLTRNL

SEQ ID NO: 231 - protein, 735 aa, Adeno-associated virus; identical to SEQ ID NO: 230

SEQ ID NO: 232 - DNA, 2211 bp, Adeno-associated virus
atggctgccgatggttatcttccagattggctcgaggacactctctctgaaggaataagacagtggtggaagctcaaacctggcccaccaccaccaaagcccgcagagcggcataaggacgacagcaggggtcttgtgcttcctgggtacaagtacctcggacccttcaacggactcgacaagggggagccggtcaacgaggcagacgccgcggccctcgagcacgacaaggcctacgaccggcagctcgacagcggagacaacccgtacctcaagtacaaccacgccgacgcagagtttcaggagcgccttaaagaagatacgtcttttgggggcaacctcggacgagcagtcttccaggcgaaaaagagggttcttgaacctctgcggcctggtttgaggaaacctgttaagacggctccgggaaaaaagaggccggtagagcactctcctgtggagccagactcctcctcgggaaccggaaaagcgggccagcagcctgcaagaaaaagattaaattttggtcagactggagacgcagactccgtacctgacccccagcctctcggacagccaccagcagccccctctggtctgggatctactacaatggctacaggcagtggcgcaccaatggcagacaataacgagggtgccgatggagtgggtaattcctcaggaaattggcattgcgattcccaatggctggacgacagagtcatcgccaccagcacccgaacctgggccctgcccacatacaacaaccacctctacaagcaaatctccagccaatcaggagcctgcaacgacaaccactactttggctacagcaccccctgggggtattttgacttcaacagattccactgccacttttcaccacgtgactggcaaagactcatcaacagcaactggggattccggcccaaaagactcaacttcaagctctttaatattcaagtcaaagaggtcacgcagaatgacggtacgacgacgattgccaataaccttaccagcacggttcaggtgtttactgactcggagtaccagctcccgtacgtcccgggctcggcgcatcaaggatgcctcccgccgtttccagcggacgtcttcatggtcccacagtatggatacctcaccctgaacaacgggagtcaggcggtaggacgctcttccttttactgcctggagtactttccttctcagatgctgcgtactggaaacaactttcagttcagctacacttttgaagacgtgcctttccacagcagctacgctcactgccagagtctggatcggctgatgaatcctctgatcgaccagtacctgtattatctgaacaagacacaaacaaatagtggaactcttcagcagtctcggctactgtttagccaagctggaccaaccaacatgtctcttcaagctaaaaactggctgcctggaccttgctacagacagcagcgtctgtcaaaacaggcaaacgacaataacaactgcaactttccctggactgcagctacaaagtatcatctaaatggccgggactcgttggttaatccaggaccagctatggccagtcacaaggatgacgaagaaaagtttttccccatgcatggaaccctgatatttggtaaacaaggaacaaatgccaacgacgcggatttggaaaatgtcatgattacagatgaagaagaaatcaggcccaccaatcccgtggctacggagcagtacgggactgtgtcaaataatttgcaaaactcaaacactggtccaactacaggaactgtcaatcaccaaggagcgttacctggtatggtgtggcaggatcgagacgtgtacctgcagggacccatttgggccaagattcctcacaccgatggacactttcatccttctccactgatgggaggttttggactcaaacacccgcctcctcagatcatgatcaaaagcactcccgttccagccaatcctcccacaaacttcagttctgccaagtttgcttcttccatcacacagtattccacgggacaggtcagcgtggagatcgagtgggagctgcagaaggagaacagcaaacgctggaatcccgaaattcagtacacttccaactacaacaagtctgttaatgtggactttactgtggacactaatggtgtgtattcagagcctcgccccattggcaccagatacctgactcgtaatctgtaa

SEQ ID NO: 233 - protein, 736 aa, Adeno-associated virus
MAADGYLPDWLEDTLSEGIRQWWKLKPGPPPPKPAERHKDDSRGLVLPGYKYLGPFNGLDKGEPVNEADAAALEHDKAYDRQLDSGDNPYLKYNHADAEFQERLKEDTSFGGNLGRAVFQAKKRVLEPLRPGLRKPVKTAPGKKRPVEHSPVEPDSSSGTGKAGQQPARKRLNFGQTGDADSVPDPQPLGQPPAAPSGLGSTTMATGSGAPMADNNEGADGVGNSSGNWHCDSQWLDDRVIATSTRTWALPTYNNHLYKQISSQSGACNDNHYFGYSTPWGYFDFNRFHCHFSPRDWQRLINSNWGFRPKRLNFKLFNIQVKEVTQNDGTTTIANNLTSTVQVFTDSEYQLPYVPGSAHQGCLPPFPADVFMVPQYGYLTLNNGSQAVGRSSFYCLEYFPSQMLRTGNNFQFSYTFEDVPFHSSYAHCQSLDRLMNPLIDQYLYYLNKTQTNSGTLQQSRLLFSQAGPTNMSLQAKNWLPGPCYRQQRLSKQANDNNNCNFPWTAATKYHLNGRDSLVNPGPAMASHKDDEEKFFPMHGTLIFGKQGTNANDADLENVMITDEEEIRPTNPVATEQYGTVSNNLQNSNTGPTTGTVNHQGALPGMVWQDRDVYLQGPIWAKIPHTDGHFHPSPLMGGFGLKHPPPQIMIKSTPVPANPPTNFSSAKFASSITQYSTGQVSVEIEWELQKENSKRWNPEIQYTSNYNKSVNVDFTVDTNGVYSEPRPIGTRYLTRNL

SEQ ID NO: 234 - DNA, 2208 bp, Adeno-associated virus
atggctgccgatggttatcttccagattggctcgaggacactctctctgaaggaataagacagtggtggaagctcaaacctggcccaccaccaccaaagcccgcagagcggcataaggacgacagcaggggtcttgtgcttcctgggtacaagtacctcggacccttcaacggactcgacaagggagagccggtcaacgaggcagacgccgcggccctcgagcacgacaaggcctacgaccggcagctcgacagcggagacaacccgtacctcaagtacaaccacgccgacgcggagtttcaggagcgccttaaagaggatacgtcttttgggggcaacctcggacgagcagtcttccaggcaaaaaagagggttctggaacctctgggcctggttgaggagcctgttaagacggctccgggaaaaaagaggccggtagagcactctcctgcagagccagattcctcctccggaactggaaagtcgggcaaccagcctgcaagaaagagattgaatttcggtcagactggagactcagactccgtacctgacccccagcctctcggacagccaccagcagccccctctggtctgggaactaatacgatggctacaggcagtggcgcaccaatggcagacaataacgagggcgccgacggagtgggtaattcctcgggaaattggcattgcgattccacatggatgggcgacagagtcatcaccaccagcacccgaacctgggccctgcccacctacaacaaccatctgtacaagcaaatatccagccagtctggagccagcaacgacaatcactactttggctacagcaccccctgggggtattttgacttcaacagattccactgccacttttcaccacgtgactggcaaagactcatcaacaacaactggggattccgacccaagagactcaacttcaagctctttaacattcaagtcaaagaggtcacgcagaatgacggtacgacgacgattgccaataaccttaccagcacggttcaggtgtttactgactcggagtaccagctcccgtacgtcctcggctcggcgcatcaaggatgcctcccgccgttcccagcagacgtcttcatggtgccacagtatggatacctcaccctgaacaacgggagtcaggcagtaggacgctcttcattttactgcctagagtactttccttctcagatgctgcgtaccggaaacagctttaccttcagctacacctttgaggacgttcctttccacagcagctacgctcacagccagagtttggaccgtctcatgaatcctctcatcgaccagtacctgtattacttgagcagaacaaacactccaagcggaaccaccacgcagtccaggcttcagttttctcaggccggagcgagtgacattcgggaccagtctaggaactggcttcctggaccctgttaccgtcagcagcgagtatcaaagacatctgcggataacaacaacagtgaatactcgtggactggagctaccaagtaccacctcaatggcagagactctctggtgaatccgggcccggccatggccagccacaaagacgatgaagaaaagttctttcctcagagcggggttcttatctttgggaagcaaggctcagagaaaacaaatgtggatattgaaaaggtcatgattacagacgaagaggaaatcaggaccaccaatcccgtggctacggagcagtatggttctgtatctaccaacctccagagcggcaacacacaagcagctaccgcagatgtcaacacacaaggcgttcttccaggcatggtctggcaagacagagacgtgtacctgcaggggcctatttgggcaaagattccacacacggacggacattttcacccctctcccctcatgggcggatttggacttaaacaccctcctccacagattctcatcaagaacaccccggtacctgcgaatccttcgaccaccttcagtgcggcaaagtttgcttccttcattacacagtactccacggggcaggtcagcgtggagatcgagtgggagctgcagaaggagaacagcaaacgctggaatcccgagatccagtacacttccaactacaacaagtctgttaatgtggactttactgtggacactaatggcgtgtattcagagcctcgccccattggcaccagatacctgactcgtaatctgtaa

SEQ ID NO: 235 - protein, 735 aa, Adeno-associated virus
MAADGYLPDWLEDTLSEGIRQWWKLKPGPPPPKPAERHKDDSRGLVLPGYKYLGPFNGLDKGEPVNEADAAALEHDKAYDRQLDSGDNPYLKYNHADAEFQERLKEDTSFGGNLGRAVFQAKKRVLEPLGLVEEPVKTAPGKKRPVEHSPAEPDSSSGTGKSGNQPARKRLNFGQTGDSDSVPDPQPLGQPPAAPSGLGTNTMATGSGAPMADNNEGADGVGNSSGNWHCDSTWMGDRVITTSTRTWALPTYNNHLYKQISSQSGASNDNHYFGYSTPWGYFDFNRFHCHFSPRDWQRLINNNWGFRPKRLNFKLFNIQVKEVTQNDGTTTIANNLTSTVQVFTDSEYQLPYVLGSAHQGCLPPFPADVFMVPQYGYLTLNNGSQAVGRSSFYCLEYFPSQMLRTGNSFTFSYTFEDVPFHSSYAHSQSLDRLMNPLIDQYLYYLSRTNTPSGTTTQSRLQFSQAGASDIRDQSRNWLPGPCYRQQRVSKTSADNNNSEYSWTGATKYHLNGRDSLVNPGPAMASHKDDEEKFFPQSGVLIFGKQGSEKTNVDIEKVMITDEEEIRTTNPVATEQYGSVSTNLQSGNTQAATADVNTQGVLPGMVWQDRDVYLQGPIWAKIPHTDGHFHPSPLMGGFGLKHPPPQILIKNTPVPANPSTTFSAAKFASFITQYSTGQVSVEIEWELQKENSKRWNPEIQYTSNYNKSVNVDFTVDTNGVYSEPRPIGTRYLTRNL

SEQ ID NO: 236 - DNA, 2211 bp, Adeno-associated virus; identical to SEQ ID NO: 126

SEQ ID NO: 237 - protein, 736 aa, Adeno-associated virus
MAADGYLPDWLEDTLSEGIRQWWKLKPGPPPPKPAERHKDDSRGLVLPGYKYLGPGNGLDKGEPVNAADAAALEHDKAYDQQLKAGDNPYLKYNHADAEFQERLKEDTSFGGNLGRAVFQAKKRLLEPLGLVEEAAKTAPGKKRPVEQSPQEPDSSAGIGKSGSQPAKKKLNFGQTGDTESVPDPQPIGEPPAAPSGVGSLTMASGGGAPVADNNEGADGVGSSSGNWHCDSQWLGDRVITTSTRTWALPTYNNHLYKQISNSTSGGSSNDNAYFGYSTPWGYFDFNRFHCHFSPRDWQRLINNNWGFRPKRLNFKLFNIQVKEVTDNNGVKTIANNLTSTVQVFTDSDYQLPYVLGSAHEGCLPPFPADVFMIPQYGYLTLNDGGQAVGRSSFYCLEYFPSQMLRTGNNFQFSYEFENVPFHSSYAHSQSLDRLMNPLIDQYLYYLSKTINGSGQNQQTLKFSVAGPSNMAVQGRNYIPGPSYRQQRVSTTVTQNNNSEFAWPGASSWALNGRNSLMNPGPAMASHKEGEDRFFPLSGSLIFGKQGTGRDNVDADKVMITNEEEIKTTNPVATESYGQVATNHQSAQAQAQTGWVQNQGILPGMVWQDRDVYLQGPIWAKIPHTDGNFHPSPLMGGFGMKHPPPQILIKNTPVPADPPTAFNKDKLNSFITQYSTGQVSVEIEWELQKENSKRWNPEIQYTSNYYKSNNVEFAVSTEGVYSEPRPIGTRYLTRNL

SEQ ID NO: 238 - DNA, 2211 bp, Adeno-associated virus
atggctgccgatggttatcttccagattggctcgaggacactctctctgaaggaataagacagtggtggaagctcaaacctggcccaccaccaccaaagcccgcagagcggcataaggacgacagcaggggtcttgtgcttcctgggtacaagtacctcggacccggcaacggactcgacaagggggagccggtcaacgcagcagacgcggcggccctcgagcacgacaaggcctacgaccagcagctcaaggccggagacaacccgtacctcaagtacaaccacgccgacgccgagttccaggagcggctcaaagaagatacgtcttttgggggcaacctcgggcgagcagtcttccaggccaaaaagaggcttcttgaacctcttggtctggttgaggaagcggctaagacggctcctggaaagaagaggcctgtagagcagtctcctcaggaaccggactcctccgcgggtattggcaaatcgggttcacagcccgctaaaaagaaactcaatttcggtcagactggcgacacagagtcagtccccgaccctcaaccaatcggagaacctcccgcagccccctcaggtgtgggatctcttacaatggcttcaggtggtggcgcaccagtggcagacaataacgaaggtgccgatggagtgggtagttcctcgggaaattggcattgcgattcccaatggctgggggacagagtcatcaccaccagcacccgaacctgggccctgcccacctacaacaatcacctctacaagcaaatctccaacagcacatctggaggatcttcaaatgacaacgcctacttcggctacagcaccccctgggggtattttgacttcaacagattccactgccacttctcaccacgtgactggcagcgactcatcaacaacaactggggattccggcctaagcgactcaacttcaagctcttcaacattcaggtcaaagaggttacggacaacaatggagtcaagaccatcgccaataaccttaccagcacggtccaggtcttcacggactcagactatcagctcccgtacgtgctcgggtcggctcacgagggctgcctcccgccgttcccagcggacgttttcatgattcctcagtacgggtatctgacgcttaatgatgggagccaggccgtgggtcgttcgtccttttactgcctggaatatttcccgtcgcaaatgctaagaacgggtaacaacttccagttcagctacgagtttgagaacgtacctttccatagcagctacgctcacagccaaagcctggaccgactaatgaatccactcatcgaccaatacttgtactatctctcaaagactattaacggttctggacagaatcaacaaacgctaaaattcagcgtggccggacccagcaacatggctgtccagggaagaaactacatacctggacccagctaccgacaacaacgtgtctcaaccactgtgactcaaaacaacaacagcgaatttgcttggcctggagcttcttcttgggctctcaatggacgtaatagcttgatgaatcctggacctgctatggccagccacaaagaaggagaggaccgtttctttcctttgtctggatctttaatttttggcaaacaaggaactggaagagacaacgtggatgcggacaaagtcatgataaccaacgaagaagaaattaaaactactaacccggtagcaacggagtcctatggacaagtggccacaaaccaccagagtgcccaagcacaggcgcagaccggctgggttcaaaaccaaggaatacttccgggtatggtttggcaggacagagatgtgtacctgcaaggacccatttgggccaaaattcctcacacggacggcaactttcacccttctccgctaatgggagggtttggaatgaagcacccgcctcctcagatcctcatcaaaaacacacctgtacctgcggatcctccaacggctttcaataaggacaagctgaactctttcatcacccagtattctactggccaagtcagcgtggagattgagtgggagctgcagaaggaaaacagcaagcgctggaacccggagatccagtacacttccaactattacaagtctaataatgttgaatttgctgttaatactgaaggtgtatatagtgaaccccgccccattggcaccagatacctgactcgtaatctgtaa

SEQ ID NO: 239 - protein, 736 aa, Adeno-associated virus
MAADGYLPDWLEDTLSEGIRQWWKLKPGPPPPKPAERHKDDSRGLVLPGYKYLGPGNGLDKGEPVNAADAAALEHDKAYDQQLKAGDNPYLKYNHADAEFQERLKEDTSFGGNLGRAVFQAKKRLLEPLGLVEEAAKTAPGKKRPVEQSPQEPDSSAGIGKSGSQPAKKKLNFGQTGDTESVPDPQPIGEPPAAPSGVGSLTMASGGGAPVADNNEGADGVGSSSGNWHCDSQWLGDRVITTSTRTWALPTYNNHLYKQISNSTSGGSSNDNAYFGYSTPWGYFDFNRFHCHFSPRDWQRLINNNWGFRPKRLNFKLFNIQVKEVTDNNGVKTIANNLTSTVQVFTDSDYQLPYVLGSAHEGCLPPFPADVFMIPQYGYLTLNDGSQAVGRSSFYCLEYFPSQMLRTGNNFQFSYEFENVPFHSSYAHSQSLDRLMNPLIDQYLYYLSKTINGSGQNQQTLKFSVAGPSNMAVQGRNYIPGPSYRQQRVSTTVTQNNNSEFAWPGASSWALNGRNSLMNPGPAMASHKEGEDRFFPLSGSLIFGKQGTGRDNVDADKVMITNEEEIKTTNPVATESYGQVATNHQSAQAQAQTGWVQNQGILPGMVWQDRDVYLQGPIWAKIPHTDGNFHPSPLMGGFGMKHPPPQILIKNTPVPADPPTAFNKDKLNSFITQYSTGQVSVEIEWELQKENSKRWNPEIQYTSNYYKSNNVEFAVNTEGVYSEPRPIGTRYLTRNL

SEQ ID NO: 240 - DNA, 2208 bp, Adeno-associated virus
atggctgccgatggttatcttccagattggctcgaggacactctctctgaaggaataagacagcggtggaagctcaaacctggcccaccaccaccagagcccgcagagcggcataaggacgacagcaggggtcttgtgcttcctgggtacaagtacctcggacccttcaacggactcgacaagggagagccggtcaacgaggcagacgccgcggccctcgagcacgacaaagcctacgaccggcagctcgacagcggagacaacccgtacctcaagtacaaccacgccgacgcggagtttcaggagcgccttaaagaagatacgtcttttgggggcaacctcggacgagcagtcttccaggcgaaaaagagggtacttgaacctctgggcctggttgaggaacctgttaagacggctccgggaaaaaagaggccggtagagcactctcctgtggagccagactcctcctcgggaaccggaaaggcgggccagcagcctgcaagaaaaagattgaattttggtcagactggagacgcagactcagtacctgacccccagcctctcggacagccaccagcagccccctctggtctgggaactaatacgatggctacaggcagtggcgcaccaatggcagacaataacgagggcgccgacggagtgggtaattcctcgggaaattggcattgcgattccacatggatgggcgacagagtcatcaccaccagcacccgaacctgggccctgcccacctacaacaaccacctctacaaacaaatttccagccaatcaggagcctcgaacgacaatcactactttggctacagcaccccttgggggtattttgacttcaacagattccactgccacttttcaccacgtgactggcaaagactcatcaacaacaactggggattccgacccaagagactcaacttcaagctctttaacattcaagtcaaagaggtcacgcagaatgacggtacgacgacgattgccaataaccttaccggcacggttcaggtgtttactgactcggagtaccagctcccgtacgtcctcggctcggcgcatcaaggatgcctcccgccgttcccagcagacgtcttcatggtgccacagtatggatacctcaccctgaacaacgggagtcaggcagtaggacgctcttcattttactgcctggagtactttccttctcagatgctgcgtaccggaaacaactttaccttcagctacacttttgaggacgttcctttccacagcagctacgctcacagccagagtctgggccgtctcatgaatcctctcatcgaccagtacctgtattacttgagcagaacaaacactccaagtggaaccaccacgcagtcaaggcttcagttttctcaggccggagcgagtgacattcgggaccagtctaggaactggcttcctggaccctgttaccgccagcagcgagtatcaaagacatctgcggataacaacaacagtgaatactcgtggactggagctaccaagtaccacctcaatggcagagactctctggtgaatccgggcccggccatggcaagccacaaggacgatgaagaaaagttttttcctcagagcggggttctcatctttgggaagcaaggctcagagaaaacaaatgtggacattgaaaaggtcatgattacagacgaagaggaaatcaggacaaccaatcccgtggctacggagcagtatggttctgtatctaccaacctccagagaggcaacagacaagcagctaccgcagatgtcaacacacaaggcgttcttccaggcatggtctggcaggacagagatgtgtaccttcaggggcccatctgggcaaagattccacacacggacggacattttcacccctctcccctcatgggtggattcggacttaaacaccctcctccacagattctcatcaagaacaccccggtacctgcgaatccttcgaccaccttcagtgcggcaaagtttgcttccttcatcacacagtactccacgggacaggtcagcgtggagatcgagtgggagctgcagaaggaaaacagcaaacgctggaatcccgaaattcagtacacttccaactacaacaagtctgttaatgtggactttactgtggacactaatggcgtgtattcagagcctcgccccattggcaccagatacctgactcgtaatctgtaa

SEQ ID NO: 241 - protein, 735 aa, Adeno-associated virus
MAADGYLPDWLEDTLSEGIRQRWKLKPGPPPPEPAERHKDDSRGLVLPGYKYLGPFNGLDKGEPVNEADAAALEHDKAYDRQLDSGDNPYLKYNHADAEFQERLKEDTSFGGNLGRAVFQAKKRVLEPLGLVEEPVKTAPGKKRPVEHSPVEPDSSSGTGKAGQQPARKRLNFGQTGDADSVPDPQPLGQPPAAPSGLGTNTMATGSGAPMADNNEGADGVGNSSGNWHCDSTWMGDRVITTSTRTWALPTYNNHLYKQISSQSGASNDNHYFGYSTPWGYFDFNRFHCHFSPRDWQRLINNNWGFRPKRLNFKLFNIQVKEVTQNDGTTTIANNLTGTVQVFTDSEYQLPYVLGSAHQGCLPPFPADVFMVPQYGYLTLNNGSQAVGRSSFYCLEYFPSQMLRTGNNFTFSYTFEDVPFHSSYAHSQSLGRLMNPLIDQYLYYLSRTNTPSGTTTQSRLQFSQAGASDIRDQSRNWLPGPCYRQQRVSKTSADNNNSEYSWTGATKYHLNGRDSLVNPGPAMASHKDDEEKFFPQSGVLIFGKQGSEKTNVDIEKVMITDEEEIRTTNPVATEQYGSVSTNLQRGNRQAATADVNTQGVLPGMVWQDRDVYLQGPIWAKIPHTDGHFHPSPLMGGFGLKHPPPQILIKNTPVPANPSTTFSAAKFASFITQYSTGQVSVEIEWELQKENSKRWNPEIQYTSNYNKSVNVDFTVDTNGVYSEPRPIGTRYLTRNL

SEQ ID NO: 242 - DNA, 2208 bp, Adeno-associated virus
atggctgccgatggttatcttccagattggctcgaggacactctctctgaaggaataagacagcggtggaagctcaaacctggcccaccaccaccagagcccgcagagcggcataaggacgacagcaggggtcttgtgcttcctgggtacaagtacctcggacccttcaacggactcgacaagggagagccggtcaacgaggcagacgccgcggccctcgagcacgacaaagcctacgaccggcagctcgacagcggagacaacccgtacctcaagtacaaccacgccgacgcggagtttcaggagcgccttaaagaagatacgtcctttgggggcaacctcggacgagcagtcttccaggcgaaaaagagggtacttgaacctctgggcctggttgaggaacctgttaagacggctccgggaaaaaagaggccggtagagcactctcctgtggagccagactcctcctcgggaaccggaaaggcgggccagcagcctgcaagaaaaagattgaattttggtcagactggagacgcagactcagtacctgacccccagcctctcggacagccaccagcagccccctctggtctgggaactaatacgatggctacaggcagtggcgcaccaatggcagacaataacgagggcgccgacggagtgggtaattcctcgggaaattggcattgcgattccacatggatgggcgacagagtcatcaccaccagcacccgaacctgggccctgcccacctacaacaaccacctctacaaacaaatttccagccaatcaggagcctcgaacgacaatcactactttggctacagcaccccttgggggtattttgacttcaacagattccactgccacttttcaccacgtgactggcaaagactcatcaacaacaactggggattccgacccaagagactcaacttcaagctctttaacattcaagtcaaagaggtcacgcagaatgacggtacgacgacgattgccaataaccttaccagcacggttcaggtgtttactgactcggagtaccagctcccgtacgtcctcggctcggcgcatcaaggatgcctcccgccgttcccagcagacgtcttcatggtgccacagtatggatacctcaccctgaacaacgagagtcaggcagtaggacgctcttcattttactgcctggagtactttccttctcagatgctgcgtaccggaaacaactttaccttcagctacacttttgaggacgttcctttccacagcagctacgctcacagccagagtctgggccgtctcatgaatcctctcatcgaccagtacctgtattacttgagcagaacaaacactccaagtggaaccaccacgcagtcaaggcttcagttttctcaggccggagcgagtgacattcgggaccagtctaggaactggcttcctggaccctgttaccgccagcagcgagtatcaaagacatctgcggataacaacaacagtgaatactcgtggactggagctaccaagtaccacctcaatggcagagactctctggtgaatccgggcccggccatggcaagccacaaggacgatgaagaaaagttttttcctcagagcggggttctcatctttgggaagcaaggctcagagaaaacaaatgtggacattgaaaaggtcatgattacagacgaagaggaaatcaggacaaccaatcccgtggctacggagcagtatggttctgtatctaccaacctccagagaggcaacagacaagcagctaccgcagatgtcaacacacaaggcgttcttccaggcatggtctggcaggacagagatgtgtaccttcaggggcccatctgggcaaagattccacacacggacggacattttcacccctctcccctcatgggtggattcggacttaaacaccctcctccacagattctcatcaagaacaccccggtacctgcgaatccttcgaccaccttcagtgcggcaaagtttgcttccttcatcacacagtactccacgggacaggtcagcgtggagatcgagtgggagctgcagaaggaaaacagcaaacgctggaatcccgaaattcagtacacttccaactacaacaagtctgttaatgtggactttactgtggacactaatggcgtgtattcagagcctcgccccattggcaccagatacctgactcgtaatctgtaa

SEQ ID NO: 243 - protein, 735 aa, Adeno-associated virus
MAADGYLPDWLEDTLSEGIRQRWKLKPGPPPPEPAERHKDDSRGLVLPGYKYLGPFNGLDKGEPVNEADAAALEHDKAYDRQLDSGDNPYLKYNHADAEFQERLKEDTSFGGNLGRAVFQAKKRVLEPLGLVEEPVKTAPGKKRPVEHSPVEPDSSSGTGKAGQQPARKRLNFGQTGDADSVPDPQPLGQPPAAPSGLGTNTMATGSGAPMADNNEGADGVGNSSGNWHCDSTWMGDRVITTSTRTWALPTYNNHLYKQISSQSGASNDNHYFGYSTPWGYFDFNRFHCHFSPRDWQRLINNNWGFRPKRLNFKLFNIQVKEVTQNDGTTTIANNLTSTVQVFTDSEYQLPYVLGSAHQGCLPPFPADVFMVPQYGYLTLNNESQAVGRSSFYCLEYFPSQMLRTGNNFTFSYTFEDVPFHSSYAHSQSLGRLMNPLIDQYLYYLSRTNTPSGTTTQSRLQFSQAGASDIRDQSRNWLPGPCYRQQRVSKTSADNNNSEYSWTGATKYHLNGRDSLVNPGPAMASHKDDEEKFFPQSGVLIFGKQGSEKTNVDIEKVMITDEEEIRTTNPVATEQYGSVSTNLQRGNRQAATADVNTQGVLPGMVWQDRDVYLQGPIWAKIPHTDGHFHPSPLMGGFGLKHPPPQILIKNTPVPANPSTTFSAAKFASFITQYSTGQVSVEIEWELQKENSKRWNPEIQYTSNYNKSVNVDFTVDTNGVYSEPRPIGTRYLTRNL

SEQ ID NO: 244 - DNA, 2208 bp, Adeno-associated virus
atggctgccgatggttatcttccagattggctcgaggacactctctctgaaggaataagacagcggtggaagctcaaacctggcccaccaccaccagagcccgcagagcggcataaggacgacagcaggggtcttgtgcttcctgggtacaagtacctcggacccttcaacggactcgacaagggagagccggtcaacgaggcagacgccgcggccctcgagcacgacaaagcctacgaccggcagctcgacagcggagacaacccgtacctcaagtacaaccacgccgacgcggagtttcaggagcgccttaaagaagatacgtcttttgggggcaacctcggacgagcagtcttccaggcgaaaaagagggtacttgaacctctgggcctggttgaggaacctgttaagacggctccgggaaaaaagaggccggtagagcactctcctgtggagccagactcctcctcgggaaccggaaaggcgggccagcagcctgcaagaaaaagattgaattttggtcagactggagacgcagactcagtacctgacccccagcctctcggacagccaccagcagccccctctggtctgggaactaatacgatggctacaggcagtggcgcaccaatggcagacaataacgagggcgccgacggagtgggtaattcctcgggaaattggcattgcgattccacatggatgggcgacagagtcatcaccaccagcacccgaacctgggccctgcccacctacaacaaccacctctacaaacaaatttccagccaatcaggagcctcgaacgacaatcactactttggctacagcaccccttgggggtattttgacttcaacagattccactgccacttttcaccacgtgactggcaaagactcatcaacaacaactggggattccgacccaagagactcaacttcaagctctttaacattcaagtcaaagaggtcacgcagaatgacggtacgacgacgattgccaataaccttaccagcacggttcaggtgtttactgactcggagtaccagctcccgtacgtcctcggctcggcgcatcaaggatgcctcccgccgttcccagcagacgtcttcatggtaccacagtatggatacctcaccctgaacaacgggagtcaggcagtaggacgctcttcattttactgcctggagtactttccttctcagatgctgcgtaccggaaacaactttaccttcagctacacttttgaggacgttcctttccacagcagctacgctcacagccagagtctgggccgtctcatgaatcctctcatcgaccagtacctgtattacttgagcagaacaaacactccaagtggaaccaccacgcagtcaaggcttcagttttctcaggccggagcgagtgacattcgggaccagtctaggaactggcttcctggaccctgttaccgccagcagcgagtatcaaagacatctgcggataacaacaacagtgaatactcgtggactggagctaccaagtaccacctcaatggcagagactctctggtgaatccgggcccggccatggcaagccacaaggacgatgaagaaaagttttttcctcagagcggggttctcatctttgggaagcaaggctcagagaaaacaaatgtggacattgaaaaggtcatgattacagacgaagaggaaatcaggacaaccaatcccgtggctacggagcagtatggttctgtatctaccaacctccagagaggcaacagacaagcagctaccgcagatgtcaacacacaaggcgttcttccaggcatggtctggcaggacagagatgtgtaccttcaggggcccatctgggcaaagattccacacacggacggacattttcacccctctcccctcatgggtggattcggacttaaacaccctcctccacagattctcatcaagaacaccccggtacctgcgaatccttcgaccaccttcagtgcggcaaagtttgcttccttcatcacacagtactccacgggacaggtcagcgtggagatcgagtgggagctgcagaaggaaaacagcaaacgctggaatcccgaaattcagtacacttccaactacaacaagtctgttaatgtggactttactgtggacactaatggcgtgtattcagagcctcgccccattggcaccagatacctgactcgtaatctgtaa

SEQ ID NO: 245 - protein, 735 aa, Adeno-associated virus
MAADGYLPDWLEDTLSEGIRQRWKLKPGPPPPEPAERHKDDSRGLVLPGYKYLGPFNGLDKGEPVNEADAAALEHDKAYDRQLDSGDNPYLKYNHADAEFQERLKEDTSFGGNLGRAVFQAKKRVLEPLGLVEEPVKTAPGKKRPVEHSPVEPDSSSGTGKAGQQPARKRLNFGQTGDADSVPDPQPLGQPPAAPSGLGTNTMATGSGAPMADNNEGADGVGNSSGNWHCDSTWMGDRVITTSTRTWALPTYNNHLYKQISSQSGASNDNHYFGYSTPWGYFDFNRFHCHFSPRDWQRLINNNWGFRPKRLNFKLFNIQVKEVTQNDGTTTIANNLTSTVQVFTDSEYQLPYVLGSAHQGCLPPFPADVFMVPQYGYLTLNNGSQAVGRSSFYCLEYFPSQMLRTGNNFTFSYTFEDVPFHSSYAHSQSLGRLMNPLIDQYLYYLSRTNTPSGTTTQSRLQFSQAGASDIRDQSRNWLPGPCYRQQRVSKTSADNNNSEYSWTGATKYHLNGRDSLVNPGPAMASHKDDEEKFFPQSGVLIFGKQGSEKTNVDIEKVMITDEEEIRTTNPVATEQYGSVSTNLQRGNRQAATADVNTQGVLPGMVWQDRDVYLQGPIWAKIPHTDGHFHPSPLMGGFGLKHPPPQILIKNTPVPANPSTTFSAAKFASFITQYSTGQVSVEIEWELQKENSKRWNPEIQYTSNYNKSVNVDFTVDTNGVYSEPRPIGTRYLTRNL

SEQ ID NO: 246 - DNA, 2208 bp, Adeno-associated virus
atggctgccgatggttatcttccagattggctcgaggacactctctctgaaggaataagacagcggtggaagctcaaacctggcccaccaccaccagagcccgcagagcggcataaggacgacagcaggggtcttgtgcttcctgggtacaagtacctcggacccttcaacggactcgacaagggagagccggtcaacgaggcagacgccgcggccctcgagcacgacaaagcctacgaccggcagctcgacagcggagacaacccgtacctcaagtacaaccacgccgacgcggagtttcaggagcgccttaaagaagatacgtcttttgggggcaacctcggacgagcagtcttccaggcgaaaaagagggtactcgaacctctgggcctggttgaggaacctgttaagacggctccgggaaaaaagaggccggtagagcactctcctgtggagccagactcctcctcgggaaccggaaaggcgggccagcagcctgcaagaaaaagattgaattttggtcagactggagacgcagactcagtacctgacccccagcctctcggacagccaccagcagccccctctggtctgggaactaatacgatggctacaggcagtggcgcaccaatggcagacaataacgagggcgccgacggagtgggtaattcctcgggaaattggcattgcgattccacatggatgggcgacagagtcatcaccaccagcacccgaacctgggccctgcccacctacaacaaccacctctacaaacaaatttccagccaatcaggagcctcgaacgacaatcactactttggctacagcaccccttgggggtattttgacttcaacagattccactgccacttttcaccacgtgactggcaaagactcatcaacaacaactggggattccgacccaagagactcaacttcaagctctttaacattcaagtcaaagaggtcacgcagaatgacggtacgacgacgattgccaataaccttaccagcacggttcaggtgtttactgactcggagtaccagctcccgtacgtcctcggctcggcgcatcaaggatgcctcccgccgttcccagcagacgtcttcatggtgccacagtatggatacctcaccctgaacaacgggagtcaggcagcaggacgctcttcattttactgcctggagtactttccttctcagatgctgcgtaccggaaacaactttaccttcagctacacttttgaggacgttcctttccacagcagctacgctcacagccagagtctgggccgtctcatgaatcctctcatcgaccagtacctgtattacttgagcagaacaaacactccaagtggaaccaccacgcagtcaaggcttcagttttctcaggccggagcgagtgacattcgggaccagtctaggaactggcttcctggaccctgttaccgccagcagcgagtatcaaagacatctgcggataacaacaacagtgaatactcgtggactggagctaccaagtaccacctcaatggcagagactctctggtgaatccgggcccggccatggcaagccacaaggacgatgaagaaaagttttttcctcagagcggggttctcatctttgggaagcaaggctcagagaaaacaaatgtggacattgaaaaggtcatgattacagacgaagaggaaatcaggacaaccaatcccgtggctacggagcagtatggttctgtatctaccaacctccagagaggcaacagacaagcagctaccgcagatgtcaacacacaaggcgttcttccaggcatggtctggcaggacagagatgtgtaccttcaggggcccatctgggcaaagattccacacacggacggacattttcacccctctcccctcatgggtggattcggacttaaacaccctcctccacagattctcatcaagaacaccccggtacctgcgaatccttcgaccaccttcagtgcggcaaagtttgcttccttcatcacacagtactccacgggacaggtcagcgtggagatcgagtgggagctgcagaaggaaaacagcaaacgctggaatcccgaaattcagtacacttccaactacaacaagtccgttaatgtggactttactgtggacactaatggcgtgtattcagagcctcgccccattggcaccagatacctgactcgtaatctgtaa

SEQ ID NO: 247 - protein, 735 aa, Adeno-associated virus
MAADGYLPDWLEDTLSEGIRQRWKLKPGPPPPEPAERHKDDSRGLVLPGYKYLGPFNGLDKGEPVNEADAAALEHDKAYDRQLDSGDNPYLKYNHADAEFQERLKEDTSFGGNLGRAVFQAKKRVLEPLGLVEEPVKTAPGKKRPVEHSPVEPDSSSGTGKAGQQPARKRLNFGQTGDADSVPDPQPLGQPPAAPSGLGTNTMATGSGAPMADNNEGADGVGNSSGNWHCDSTWMGDRVITTSTRTWALPTYNNHLYKQISSQSGASNDNHYFGYSTPWGYFDFNRFHCHFSPRDWQRLINNNWGFRPKRLNFKLFNIQVKEVTQNDGTTTIANNLTSTVQVFTDSEYQLPYVLGSAHQGCLPPFPADVFMVPQYGYLTLNNGSQAAGRSSFYCLEYFPSQMLRTGNNFTFSYTFEDVPFHSSYAHSQSLGRLMNPLIDQYLYYLSRTNTPSGTTTQSRLQFSQAGASDIRDQSRNWLPGPCYRQQRVSKTSADNNNSEYSWTGATKYHLNGRDSLVNPGPAMASHKDDEEKFFPQSGVLIFGKQGSEKTNVDIEKVMITDEEEIRTTNPVATEQYGSVSTNLQRGNRQAATADVNTQGVLPGMVWQDRDVYLQGPIWAKIPHTDGHFHPSPLMGGFGLKHPPPQILIKNTPVPANPSTTFSAAKFASFITQYSTGQVSVEIEWELQKENSKRWNPEIQYTSNYNKSVNVDFTVDTNGVYSEPRPIGTRYLTRNL

SEQ ID NO: 248 - protein, 738 aa, Adeno-associated virus; identical to SEQ ID NO: 90

SEQ ID NO: 249 - DNA, 2217 bp, Adeno-associated virus
atggctgctgacggttatcttccagattggctcgaggacaacctctctgagggcattcgcgagtggtgggacctgaaacctggagcccccaagcccaaggccaaccagcagaagcaggacgacggccggggtctggtgcttcctggctacaagtacctcggacccttcaacggactcgacaagggggagcccgtcaacgcggcggacgcagcggccctcgagcacgacaaggcctacgaccagcagctcaaagcgggtgacaatccgtacctgcggtataaccacgccgacgccgagtttcaggagcgtctgcaagaagatacgtcttttgggggcaacctcgggcgagcagtcttccaggccaagaagcgggttctcgaacctctcggtctggttgaggaagctgctaagacggctcctggaaagaagagaccggtagaaccgtcacctcagcgttcccccgactcctccacgggcatcggcaagaaaggccagcagcccgctaaaaagagactgaactttggtcagactggcgactcagagtcagtccccgaccctcaaccaatcggagaaccaccagcaggcccctctggtctgggatctggtacaatggctgcaggcggtggcgctccaatggcagacaataacgaaggcgccgacggagtgggtagttcctcaggaaattggcattgcgattccacatggctgggcgacagagtcatcaccaccagcacccgaacctgggccctgcccacctacaacaaccacctctacaagcaaatatccaatgggacatcgggaggaagcaccaacgacaacacctacttcggctacagcaccccctgggggtattttgacttcaacagattccactgccacttctcaccacgtgactggcagcgactcatcaacaacaactggggattccggccaaaaagactcagcttcaagctcttcaacatccaggtcaaggaggtcacgcagaatgaaggcaccaagaccatcgccaataaccttaccagcacgattcaggtatttacggactcggaataccagctgccgtacgtcctcggctccgcgcaccagggctgcctgcctccgttcccggcggacgtcttcatgattccccagtacggctaccttacactgaacaatggaagtcaagccgtaggccgttcctccttctactgcctggaatattttccatctcaaatgctgcgaactggaaacaattttgaattcagctacaccttcgaggacgtgcctttccacagcagctacgcacacagccagagcttggaccgactgatgaatcctctcatcgaccagtacctgtactacttatccagaactcagtccacaggaggaactcaaggtacccagcaattgttattttctcaagctgggcctgcaaacatgtcggctcaggctaagaactggctacctggaccttgctaccggcagcagcgagtctctacgacactgtcgcaaaacaacaacagcaactttgcttggactggtgccaccaaatatcacctgaacggaagagactctttggtaaatcccggtgtcgccatggcaacccacaaggacgacgaggaacgcttcttcccgtcgagtggagtcctgatgttcggaaaacagggtgctggaagagacaatgtggactacagcagcgttatgctaaccagcgaagaagaaattaaaaccactaaccccgtagccacagaacaatacggtgtggtggctgacaacttgcagcaaaccaatacagggcctattgtgggaaatgtcaacagccaaggagccttacctggcatggtctggcagaaccgagacgtgtacctgcagggtcccatctgggccaagattcctcacacggacggcaacttccacccttcaccgctaatgggaggatttggactgaagcacccacctcctcagatcctgatcaagaacacgccggtacctgcggatcctccaacaacgttcagccaggcgaaattggcttccttcattacgcagtacagcaccggacaggtcagcgtggaaatcgagtgggagctgcagaaggagaacagcaaacgctggaacccagagattcagtacacttcaaactactacaaatctacaaatgtggactttgctgtcaatacagagggaacttattctgagcctcgccccattggtactcgttacctcacccgtaatctgtaa

SEQ ID NO: 250 - protein, 738 aa, Adeno-associated virus
MAADGYLPDWLEDNLSEGIREWWDLKPGAPKPKANQQKQDDGRGLVLPGYKYLGPFNGLDKGEPVNAADAAALEHDKAYDQQLKAGDNPYLRYNHADAEFQERLQEDTSFGGNLGRAVFQAKKRVLEPLGLVEEAAKTAPGKKRPVEPSPQRSPDSSTGIGKKGQQPAKKRLNFGQTGDSESVPDPQPIGEPPAGPSGLGSGTMAAGGGAPMADNNEGADGVGSSSGNWHCDSTWLGDRVITTSTRTWALPTYNNHLYKQISNGTSGGSTNDNTYFGYSTPWGYFDFNRFHCHFSPRDWQRLINNNWGFRPKRLSFKLFNIQVKEVTQNEGTKTIANNLTSTIQVFTDSEYQLPYVLGSAHQGCLPPFPADVFMIPQYGYLTLNNGSQAVGRSSFYCLEYFPSQMLRTGNNFEFSYTFEDVPFHSSYAHSQSLDRLMNPLIDQYLYYLSRTQSTGGTQGTQQLLFSQAGPANMSAQAKNWLPGPCYRQQRVSTTLSQNNNSNFAWTGATKYHLNGRDSLVNPGVAMATHKDDEERFFPSSGVLMFGKQGAGRDNVDYSSVMLTSEEEIKTTNPVATEQYGVVADNLQQTNTGPIVGNVNSQGALPGMVWQNRDVYLQGPIWAKIPHTDGNCHPSPLMGGFGLKHPPPQILIKNTPVPADPPTTFSQAKLASFITQYSTGQVSVEIEWELQKENSKRWNPEIQYTSNYYKSTNVDFAVNTEGTYSEPRPIGTRYLTRNL

SEQ ID NO: 251 - protein, 738 aa, Adeno-associated virus
MAADGYLPDWLEDNLSEGIREWWDLKPGAPKPKANQQKQDDGRGLVLPGYKYLGPFNGLDKGEPVNAADAAALEHDKAYDQQLKAGDNPYLRYNHADAEFQERLQEDTSFGGNLGRAVFQAKKRVLEPLGLVEEGAKTAPGKKRPVEPSPQRSPDSSTGIGKKGQQPARKRLNFGRTGDSESVPDPQPIGEPPAAPSSVGSGTMAAGGGAPMADNNEGADGVGSSSGNWHCDSTWLGDRVITTSTRTWALPTYNNHLYKQISNGTSGGSTNDNTYFGYSTPWGYLDFNRFHCHFSPRDWQRLINNNWGFRPKRLSFKLFNIQVKEVTQNEGTKTIANNLASTIQVFTDSEYQPPYVLGSAHQGCLPPFPADVFMIPQYGYLTLNNGSQAVGRSSFYCLEYFPSQMLRTGNNFSFSYTFEDVPFHSSYAHSQSLDRLMNPLIDQYLYYLSRTQSTGGTAGTQQLLFSRAGPSNMSAQARNWLPGPCYRQQRVSTTLSQNNNSNFAWTGATKYHLNGRDSLVNPGVAMATNKDDEDRFFPSSGILMFGKQGAGKDNVDYSNVMLTSEEEIKTTNPVATEQYGVVADNLQQQNTAPTVGAVNSQGALPGMVWQNRDVYLQGPIWAKIPHTDGNFHPSPLMGGFGLKHPPPQILIKNTPVPADPPTAFNQAKLNSFIAQYSTGQVSVEIEWELQKENSKRWNPEIQYTSNYYKSTNADFAVNTEGVYSEPRPIGTRYLTRNL

SEQ ID NO: 252 - DNA, 2217 bp, Adeno-associated virus
atggctgccgatggttatcttccagattggctcgaggacaacctctctgagggcattcgcgagtggtgggacctgaaacctggagccccgaaacccaaagccaaccagcaaaagcaggacgacggccggggtctggtgcttcctggctacaagtacctcggacccttcaacggactcgacaagggggagcccgtcaacgcggcggacgcagcggccctcgagcacgacaaggcctacgaccagcagctcaaagcgggtgacaatccgtacctgcggtataatcacgccgacgccgagtttcaggagcgtctgcaagaagatacgtcttttgggggcaacctcgggcgagcagtcttccaggccaagaagcgggttctcgaacctctcggtctggttgaggaaggcgctaagacggctcctggaaagaagagaccggtagagccgtcaccacagcgttcccccgactcctccacgggcatcggcaagaaaggccagcagcccgccagaaagagactcaatttcggtcggactggcgactcagagtcagtccccgaccctcaacctatcggagaacctccagcagcgccctctagtgtgggatctggtacaatggctgcaggcggtggcgcaccaatggcagacaataacgaaggtgccgacggagtgggtagttcctcgggaaattggcattgcgattccacatggctgggcgacagagttatcaccaccagcacccgaacctgggccctgcccacctacaacaaccacctctacaagcaaatctccaacgggacctcgggaggcagcaccaacgacaacacctactttggctacagcaccccctgggggtatcttgactttaacagattccactgccacttctcaccacgtgactggcagcgactcatcaacaacaactggggattccggcccaagagactcagcttcaagctcttcaacatccaggtcaaagaggtcacgcagaatgaaggcaccaagaccatcgccaataacctcgccagcaccatccaggtgtttacggactcggaataccagccgccgtacgtcctcggctctgcccaccagggctgcctgcctccgttcccggcggacgtcttcatgattcctcagtacggctacctgactctcaacaacggtagtcaggccgtgggacgttcctccttctactgcctggagtacttcccctctcagatgctgagaacgggcaacaacttttccttcagctacactttcgaggacgtgcctttccacagcagctacgcgcacagccagagtttggacaggctgatgaatcctctcatcgaccagtacctgtactacctgtcaagaacccagtctacgggaggcacagcgggaacccagcagttgctgttttctcgggccgggcctagcaacatgtcggctcaggccagaaactggctgcctggaccctgctacagacagcagcgcgtctccacgacactgtcgcaaaacaacaacagcaactttgcctggactggtgccaccaagtatcatctgaacggcagagactctctggtgaatccgggcgtcgccatggcaaccaacaaggacgacgaggaccgcttcttcccatccagcggcatcctcatgtttggcaagcagggagctggaaaagacaacgtggactatagcaacgtgatgctaaccagcgaggaagaaatcaagaccaccaaccccgtggccacagaacagtatggcgtggtggctgataacctacagcagcaaaacaccgctcctactgtgggggccgtcaacagccagggagccttacctggcatggtctggcagaaccgggacgtgtacctgcagggtcctatttgggccaagattcctcacacagatggcaactttcacccgtctcctttaatgggcggctttggacttaaacatccgcctcctcagatcctcatcaaaaacactcctgttcctgcggatcctccaacagcgttcaaccaggccaagctgaattctttcatcgcgcagtacagcaccggacaagtcagcgtggagatcgagtgggagctgcagaaggagaacagcaagcgctggaacccagagattcagtatacttccaactactacaaatctacaaatgcggactttgctgttaatactgagggtgtttactctgagcctcgccccattggcactcgttacctcacccgtaatctgtaa

SEQ ID NO: 253 - DNA, 2208 bp, Adeno-associated virus
atggctgccgatggttatcttccagattggctcgaggacactctctctgaaggaataagacagtggtggaagctcaaacctggcccaccaccaccaaagcccgcagagcggcataaggacgacagcaggggtcttgtgcttcctgggtacaagtacctcggacccttcaacggactcgacaagggggagccggtcaacgaggcagacgccgcggccctcgagcacgacaaggcctacgaccggcagctcgacagcggagacaacccgtacctcaagtacaaccacgccgacgcagagtttcaggagcgccttaaagaagatacgtcttttgggggcaacctcggacgagcagtcttccaggcgaaaaagagggttcttgaacctctgggcctggttgaggagcctgttaagacggctccgggaaaaaagaggccggtagagcactctcctgtggagccagactcctcctcgggaaccggaaaagcgggccagcagcctgcaagaaaaagattaaattttggtcagactggagacgcagactccgtacctgacccccagcctctcggacagccaccagcagccccctctggtctgggatctactacaatggctacaggcagtggcgcaccaatggcagacaataacgagggtgccgatggagtgggtaattcctcaggaaattggcattgcgattcccaatggctgggcgacagagtcatcaccaccagcacccgaacctgggccctgcccacatacaacaaccacctctacaagcaaatctccagccaatcaggagccagcaacgacaaccactactttggctacagcaccccctgggggtattttgacttcaacagattccactgccacttttcaccacgtgactggcaaagactcgtcaacaacaaccggggattccggcccaaaagactcaacttcaagctctttaatattcaagtcaaagaggtcacgcagaatgacggtacgacgacgattgccaataaccttaccagcacggttcaggtgtttactgactcggagtaccagctcccgtacgtcctgggctcggcgcatcaaggatgcctcccgccgtttccagcggacgtcttcatggtcccacagtatggatacctcaccctgaacaacgggagtcaggcggtaggacgctcttccttttactgcctggagtactttccttctcagatgctgcgtactggaaacaactttcagttcagctacacttttgaagacgtgcctttccacagcagctacgctcacagccagagtctggatcggctgatgaatcctctgatcgaccagtacctgtattatctgaacaagacacaaacaaatagtggaactcttcagcagtctcggctactgtttagccaagctggaccaaccaacatgtctcttcaagctaaaaactggctgcctggaccttgctacagacagcagcgtctgtcaaaacaggcaaacgacaacaacaacagcaactttccctggactgcagctacaaagtatcatctaaatggccgggactcgttggttaatccaggaccagctatggccagtcacaaggatgacgaagaaaagtttttccccatgcatggaaccctgatatttggtaaacaaggaacaaatgccaacgacgcggatttggaaaatgtcatgattacagatgaagaagaaatcagggccaccaatcccgtggctacggagcagtacgggactgtgtcaaataatttgcaaaactcaaacactggtccaactactggaactgtcaatcaccaaggagcgttacctggtatggtgtggcaggatcgagacgtgtacctgcagggacccatttgggccaagattcctcacaccgatggacactttcatccttctccactgatgggaggttttggactcaaacacccgcctcctcagatcatgatcaaaaacactcccgttccagccaatcctcccacaaacttcagttctgccaagtttgcttctttcatcacacagtattccacgggacaggtcagcgtggagatcgagtgggagctgcagaaggagaacagcaaacgctggaatcccgaaattcagtacacttccaactacaacaagtctgttaatgtggactttactgtggacactaatggtgtgtattcagagcctcgccccattggcaccagatacctgactcgtaatctgtaa

SEQ ID NO: 254 - protein, 735 aa, Adeno-associated virus
MAADGYLPDWLEDTLSEGIRQWWKLKPGPPPPKPAERHKDDSRGLVLPGYKYLGPFNGLDKGEPVNEADAAALEHDKAYDRQLDSGDNPYLKYNHADAEFQERLKEDTSFGGNLGRAVFQAKKRVLEPLGLVEEPVKTAPGKKRPVEHSPVEPDSSSGTGKAGQQPARKRLNFGQTGDADSVPDPQPLGQPPAAPSGLGSTTMATGSGAPMADNNEGADGVGNSSGNWHCDSQWLGDRVITTSTRTWALPTYNNHLYKQISSQSGASNDNHYFGYSTPWGYFDFNRFHCHFSPRDWQRLVNNNRGFRPKRLNFKLFNIQVKEVTQNDGTTTIANNLTSTVQVFTDSEYQLPYVLGSAHQGCLPPFPADVFMVPQYGYLTLNNGSQAVGRSSFYCLEYFPSQMLRTGNNFQFSYTFEDVPFHSSYAHSQSLDRLMNPLIDQYLYYLNKTQTNSGTLQQSRLLFSQAGPTNMSLQAKNWLPGPCYRQQRLSKQANDNNNSNFPWTAATKYHLNGRDSLVNPGPAMASHKDDEEKFFPMHGTLIFGKQGTNANDADLENVMITDEEEIRATNPVATEQYGTVSNNLQNSNTGPTTGTVNHQGALPGMVWQDRDVYLQGPIWAKIPHTDGHFHPSPLMGGFGLKHPPPQIMIKNTPVPANPPTNFSSAKFASFITQYSTGQVSVEIEWELQKENSKRWNPEIQYTSNYNKSVNVDFTVDTNGVYSEPRPIGTRYLTRNL

SEQ ID NO: 255 - protein, 738 aa, Adeno-associated virus
MAADGYLPDWLEDNLSEGIREWWDLKPGAPKPKANQQKQDDGRGLVLPGYKYLGPFNGLDKGEPVNAADAAALEHDKAYDQQLKAGDNPYLRYNHADAEFQERLQEDTSFGGNLGRAVFQAKKRVLEPLGLVEEAAKTAPGKKRPVEPSPQRSPDSSTGIGKKGQQPAKKRLSFGQTGDSESVPDPQPIGEPPAGPSGLGSGTMAAGGGAPMADNNEGADGVGSSSGNWHCDSTWLGDRVITTSTRTWALPTYNNHLYKQISNGTSGGSTNDNTYFGYSTPWGYFDFNRFHCHFSPRDWQRLINNNWGFRPKRLSFKLFNIQVKEVTQNEGTKTIANNLTSTIQVFTDSEYQLPYVLGSAHQGCLPPFPADVFMIPQYGYLTLNNGSQAVGRSSFYCLEYFPSQMLRTGNNSEFSYTFEDVPFHSSYAHSQSLDRLMNPLIDQYLYYLSRTQSTGGTQGTQQLLFSQAGPANMSAQAKNWLPGPCYRQQRVSTTLSQNNNSNFAWTGATKYHLNGRDSLVNPGVAMATHKDDEERFFPSSGVLMFGKQGAGRDNVDYSSVMLTSEEEIKTTNPVATEQYGVVADNLQQTNTGPIVGNVNSQGALPGMVWQNRDVYLQGPIWAKIPHTDGNFHPSPLMGGFGLKHPPPQILIKNTPVPADPPTTFSQAKLASFITQYSTGQVSVEIEWELQKENSKRWNPEIQYTSNYYKSTNVDFAVNTEGTYSEPRPIGTRYLTRNL

SEQ ID NO: 256 - DNA, 2217 bp, Adeno-associated virus
atggctgctgacggttatcttccagattggctcgaggacaacctctctgagggcattcgcgagtggtgggacctgaaacctggagcccccaagcccaaggccaaccagcagaagcaggacgacggccggggtctggtgcttcctggctacaagtacctcggacccttcaacggactcgacaagggggagcccgtcaacgcggcggacgcagcggccctcgagcacgacaaggcctacgaccagcagctcaaagcgggtgacaatccgtacctgcggtataaccacgccgacgccgagtttcaggagcgtctgcaagaagatacgtcttttgggggcaacctcgggcgagcagtcttccaggccaagaagcgggttctcgaacctctcggtctggttgaggaagctgctaagacggctcctggaaagaagagaccggtagaaccgtcacctcagcgttcccccgactcctccacgggcatcggcaagaaaggccagcagcccgctaaaaagagactgagctttggtcagactggcgactcagagtcagtccccgaccctcaaccaatcggagaaccaccagcaggcccctctggtctgggatctggtacaatggctgcaggcggtggcgctccaatggcagacaataacgaaggcgccgacggagtgggtagttcctcaggaaattggcattgcgattccacatggctgggcgacagagtcatcaccaccagcacccgaacctgggccctgcccacctacaacaaccacctctacaagcaaatatccaatgggacatcgggaggaagcaccaacgacaacacctacttcggctacagcaccccctgggggtattttgacttcaacagattccactgccacttctcaccacgtgactggcagcgactcatcaacaacaactggggattccggccaaaaagactcagcttcaagctcttcaacatccaggtcaaggaggtcacgcagaatgaaggcaccaagaccatcgccaataaccttaccagcacgattcaggtatttacggactcggaataccagctgccgtacgtcctcggctccgcgcaccagggctgcctgcctccgttcccggcggacgtcttcatgattccccagtacggctaccttacactgaacaatggaagtcaagccgtaggccgttcctccttctactgcctggaatattttccatctcaaatgctgcgaactggaaacaattctgaattcagctacaccttcgaggacgtgcctttccacagcagctacgcacacagccagagcttggaccgactgatgaatcctctcatcgaccagtacctgtactacttatccagaactcagtccacaggaggaactcaaggtacccagcaattgttattttctcaagctgggcctgcaaacatgtcggctcaggctaagaactggctacctggaccttgctaccggcagcagcgagtctctacgacactgtcgcaaaacaacaacagcaactttgcttggactggtgccaccaaatatcacctgaacggaagagactctttggtaaatcccggtgtcgccatggcaacccacaaggacgacgaggaacgcttcttcccgtcgagtggagtcctgatgtttggaaaacagggtgctggaagagacaatgtggactacagcagcgttatgctaaccagcgaagaagaaattaaaaccactaaccctgtagccacagaacaatacggtgtggtggctgacaacttgcagcaaaccaatacagggcctattgtgggaaatgtcaacagccaaggagccttacctggcatggtctggcagaaccgagacgtgtacctgcagggtcccatctgggccaagattcctcacacggacggcaacttccacccttcaccgctaatgggaggatttggactgaagcacccacctcctcagatcctgatcaagaacacgccggtacctgcggatcctccaacaacgttcagccaggcgaaattggcttccttcattacgcagtacagcaccggacaggtcagcgtggaaatcgagtgggagctgcagaaggagaacagcaaacgctggaacccagagattcagtacacttcaaactactacaaatctacaaatgtggactttgctgtcaatacagagggaacttattctgagcctcgccccattggtactcgttacctcacccgtaatctgtaa

SEQ ID NO: 257 - protein, 738 aa, Adeno-associated virus
MAADGYLPDWLEDNLSEGIREWWDLKPGAPKPKANQQKQDDGRGLVLPGYKYLGPFNGLDKGEPVNAADAAALEHDKAYDQQLKAGDNPYLRYNHADAEFQERLQEDTSFGGNLGRAVFQAKKRVLEPLGPVEEAAKTAPGKKRPVEPPPQRSPDSSTGIGKKGQQPAKKRLNFGQTGDSESVPDPQPIGEPPAGPSGLGSGTMAAGGGAPMADNNEGADGVGSSSGNWHCDSTWLGDRVITTSTRTWALPTYNNHLYKQISNGTSGGSTNDNTYFGYSTPWGYFDFNRFHCHFSPRDWQRLINNNWGFRPKRLSFKLFNIQVKEVTQNEGTKTVANNLTSTIQVFTDSEYQLPYVLGSAHQGCLPPFPADVFMIPQYGYLTLNNGSQAVGRSSFYCLEYFPSQMLRTGNNFEFSYTFEDVPFHSSYAHSQSLDRLMNPLIDQYLYYLSRTQSTGGTQGTQQLLFSQAGPANMSAQAKNWLPGPCYRQQRVSTTLSQNNNSNFAWTGATKYHLNGRDSLVNPGVAMATHKDDEERFFPSSGVLMFGKQGAGRDNVDYSSVMLTSEEEIKTTNPVATEQYGVVADNLQQTNTGPIVGNVNSQGALPGMVWQNRDVYLQGPIWAKIPHTDGNFHPSPLMGGFGLKHPPPQILIKNTPVPADPPTTFSQAKLASFITQYSTGQVSVEIEWELQKENSKRWNPEIQYTSNYYKSTNVDFAVNTEGTYSEPRPIGTRYLTRNL

SEQ ID NO: 258 - DNA, 2217 bp, Adeno-associated virus
atggctgctgacggttatcttccagattggctcgaggacaacctctctgagggcattcgcgagtggtgggacctgaaacctggagcccccaagcccaaggccaaccagcagaagcaggacgacggccggggtctggtgcttcctggctacaagtacctcggacccttcaacggactcgacaagggggagcccgtcaacgcggcggacgcagcggccctcgagcacgacaaggcctacgaccagcagctcaaagcgggtgacaatccgtacctgcggtataaccacgccgacgccgagtttcaggagcgtctacaagaagatacgtcttttgggggcaacctcgggcgagcagtcttccaggccaagaagcgggttctcgaacctctcggtccggttgaggaagctgctaagacggctcctggaaagaagagaccggtagaaccgccacctcagcgttcccccgactcctccacgggcatcggcaagaaaggccagcagcccgctaaaaagagactgaactttggtcagactggcgactcagagtcagtccccgaccctcaaccaatcggagaaccaccagcaggcccctctggtctgggatctggtacaatggctgcaggcggtggcgctccaatggcagacaataacgaaggcgccgacggagtgggtagttcctcaggaaattggcattgcgattccacatggctgggcgacagagtcatcaccaccagcacccgaacctgggccctgcccacctacaacaaccacctctacaagcaaatatccaatgggacatcgggaggaagcaccaacgacaacacctacttcggctacagcaccccctgggggtattttgacttcaacagattccactgccacttctcaccacgtgactggcagcgactcatcaacaacaactggggattccggccaaaaagactcagcttcaagctcttcaacatccaggtcaaggaggtcacgcagaatgaaggcaccaagaccgtcgccaataaccttaccagcacgattcaggtatttacggactcggaataccagctgccgtacgtcctcggctccgcgcaccagggctgcctgcctccgttcccggcggacgtcttcatgattccccagtacggctaccttacactgaacaatggaagtcaagccgtaggccgttcctccttctactgcctggaatattttccatctcaaatgctgcgaactggaaacaattttgaattcagctacaccttcgaggacgtgcctttccacagcagctacgcacacagccagagcttggaccgactgatgaatcctctcatcgaccagtacctgtactacttatccagaactcagtccacaggaggaactcaaggtacccagcaattgttattttctcaagctgggcctgcaaacatgtcggctcaggctaagaactggctacctggaccttgctaccggcagcagcgagtctctacgacactgtcgcaaaacaacaacagcaactttgcttggactggtgccaccaaatatcacctgaacggaagagactctttggtaaatcccggtgtcgccatggcaacccacaaggacgacgaggaacgcttcttcccgtcgagtggagtcctgatgtttggaaaacagggtgctggaagagacaatgtggactacagcagcgttatgctaaccagcgaagaagaaattaaaaccactaaccctgtagccacagaacaatacggtgtggtggctgacaacttgcagcaaaccaatacagggcctattgtgggaaatgtcaacagccaaggagccttacctggcatggtctggcagaaccgagacgtgtacctgcagggtcccatctgggccaagattcctcacacggacggcaacttccacccttcaccgctaatgggaggatttggactgaagcacccacctcctcagatcctgatcaagaacacgccggtacctgcggatcctccaacaacgttcagccaggcgaaattggcttccttcattacgcagtacagcaccggacaggtcagcgtggaaatcgagtgggagctgcagaaggagaacagcaaacgttggaacccagagattcagtacacttcaaactactacaaatctacaaatgtggactttgctgtcaatacagagggaacttattctgagcctcgccccattggtactcgttacctcacccgtaatctgtaa

SEQ ID NO: 259 - protein, 738 aa, Adeno-associated virus
MAADGYLPDWLEDNLSEGIREWWDLKPGAPKPKANQQKQDDGRGLVLPGYKYLGPFNGLDKGEPVNAADAAALEHDKAYDQQLKAGDNPYLRYNHADAEFQERLQEDTSFGGNLGRAVFQAKKRVLEPLGLVEEAAKTAPGKKRPVEPSPQRSPDSSTGIGKKGQQPAKKRLNFGQTGDSESVPDPQPIGEPPAGPSGLGSGTMAAGGGAPMADNNEGADGVGSSSGNWHCDSTWLGDRVITTSTRTWALPTYNNHLYKQISNGTSGGSTNDNTYFGYSTPWGYFDFNRFHCHFSPRDWQRLINNNWGFRPKRLSFKLFNIQVKEVTQNEGTKTIANNLTSTIQVFTDSEYQLPYVLGSAHQGCLPPFPADVFMIPQYGYLTLNNGSQAVGRSSFYCLEYFPSQMLRTGNNFEFSYTFEDVPFHSSYAHSQSLDRLMNPLIDQYLYYLSRTQSTGGTQGTQQLLFSQAGPANMSAQAKNWLPGPCYRQQRVSTTLSQSNNSNFAWTGATKYHLNGRDSLVNPGVAMATHKDDEERFFPSSGVLMFGKQGAGRDNVDYSSVMLTSEEEIKTTNPVATEQYGVVADNLQQTNTGPIVGNVNSQGALPGMVWQNRDVYLQGPIWAKIPHTDGNFHPSPLMGGLGLKHPPPQILIKNTPVPADPPTTFSQAKLASFITQYSTGQVSVEIEWELQKENSKRWNPEIQYTSNYYKSTNVDFAVNTEGTYSEPRPIGTRYLTRNL

SEQ ID NO: 260 - DNA, 2217 bp, Adeno-associated virus
atggctgctgacggttatcttccagattggctcgaggacaacctctctgagggcattcgcgagtggtgggacctgaaacctggagcccccaagcccaaggccaaccagcagaagcaggacgacggccggggtctggtgcttcctggctacaagtacctcggacccttcaacggactcgacaagggggagcccgtcaacgcggcggacgcagcggccctcgagcacgacaaggcctacgaccagcagctcaaagcgggtgacaatccgtacctgcggtataaccacgccgacgccgagtttcaggagcgtctgcaagaagatacgtcttttgggggcaacctcgggcgagcagtcttccaggccaagaagcgggttctcgaacctctcggtctggttgaggaagcggctaagacggctcctggaaagaagagaccggtagaaccgtcacctcagcgttcccccgactcctccacgggcatcggcaagaaaggccagcagcccgctaaaaagagactgaactttggtcagactggcgactcagagtcagtccccgaccctcaaccaatcggagaaccaccagcaggcccctctggtctgggatctggtacaatggctgcaggcggtggcgctccaatggcagacaataacgaaggcgccgacggagtgggtagttcctcaggaaattggcattgcgattccacatggctgggcgacagagtcatcaccaccagcacccgaacctgggccctgcccacctacaacaaccacctctacaagcaaatatccaatgggacatcgggaggaagcaccaacgacaacacctacttcggctacagcaccccctgggggtattttgacttcaacagattccactgccacttctcaccacgtgactggcagcgactcatcaacaacaactggggattccggccaaaaagactcagcttcaagctcttcaacatccaggtcaaggaggtcacgcagaatgaaggcaccaagaccatcgccaataaccttaccagcacgattcaggtatttacggactcggaataccagctgccgtacgtcctcggctccgcgcaccagggctgcctgcctccgttcccggcggacgtcttcatgattccccagtacggctaccttacactgaacaatggaagtcaagccgtaggccgttcctccttctactgcctggaatattttccatctcaaatgctgcgaactggaaacaattttgaattcagctacaccttcgaggacgtgcctttccacagcagctacgcacacagccagagcttggaccgactgatgaatcctctcatcgaccagtacctgtactacttatccagaactcagtccacaggaggaactcaaggtacccagcaattgttattttctcaagctgggcctgcaaacatgtcggctcaggctaagaactggctacctggaccttgctaccggcagcagcgagtctctacgacactgtcgcaaagcaacaacagcaactttgcttggactggtgccaccaaatatcacctgaacggaagagactctttggtaaatcccggtgtcgccatggcaacccacaaggacgacgaggaacgcttcttcccgtcgagtggagtcctgatgtttggaaaacagggtgctggaagagacaatgtggactacagcagcgttatgctaaccagcgaagaagaaattaaaaccactaaccctgtagccacagaacaatacggtgtggtggctgacaacttgcagcaaaccaatacagggcctattgtgggaaatgtcaacagccaaggagccttacctggcatggtctggcagaaccgagacgtgtacctgcagggtcccatctgggccaagattcctcacacggacggcaacttccacccttcaccgctaatgggaggacttggactgaagcacccacctcctcagatcctgatcaagaacacgccggtacctgcggatcctccaacaacgttcagccaggcgaaattggcttccttcattacgcagtacagcaccggacaggtcagcgtggaaatcgagtgggagctgcagaaggagaacagcaaacgctggaacccagagattcagtacacttcaaactactacaaatctacaaatgtggactttgctgtcaatacagagggaacttattctgagcctcgccccattggtactcgttacctcacccgtaatctgtaa

SEQ ID NO: 261 - protein, 737 aa, Adeno-associated virus
MAADGYLPDWLEDNLSEGIREWWDLKPGAPKPKANQQKQDDGRGLVLPGYKYLGPFNGLDKGEPVNAADAAALEHDKAYDQQLKAGDNPYPRYNHADAEFQERLQEDTPFGGNLGRAVFQAKKRVLEPLGLVEEAAKTAPGKKRPVEPSPQRSPDSSTGIGKKGQQPAKKRLNFGQTGDSESVPDPQPIGEPPAGPSGLGSGTMAAGGGAPMADNNEGADGVGNASGNWHCDSTWLGDRVITTSTRTWALPTYNNHLYKQISSASTGASNDNHYFGYSTPWGYFDFNRFHCHFSPRDWQRLINNNWGFRPKRLNFKLFNIQVKEVTTNDGVTTIANNLTSTVQVFSDSEYQLPYVLGSAHQGCLPPFPADVFMIPQYGYLTLNNGSQAVGRSSFYCLEYFPSQMLRTGNNFTFSYTFEEVPLHSSYAHSQSLDRLMNPLIVQYLYYLNRTQNQSGSAQNKDLLFSRGSPAGMSVQPKNWLPGPCYRQQRVSKTKTDNNNSNFTWTGASKYNLNGRESIINPGTAMASHKDDEDKFFPMSGVMIFGKESAGASNTALDNVMITDEEEIKATNPVATERFGTVAVNFQSSSTDPATGDVHAMGALPGMVWQDRDVYLQGPIWAKIPHTDGHFHPSPLMGGFGLKNPPPQILIKNTPVPANPPAEFSATKFASFITQYSTGQVSVEIEWELQKENSKRWNPEVQYTSNYAKSASVDFTVDNNGLYTEPRPIGTRYLTRPL

SEQ ID NO: 262 - protein, 737 aa, Adeno-associated virus
MAADGYLPDWLEDNLSEGIREWWDLKPGAPKPKANQQKQDDGRGLVLPGYKYLGPFNGLDKGEPVNAADAAALEHDKAYDQQLKAGDNPYPRYNHADAEFQERLQEDTSFGGNLGRAVFQAKKRVLEPLGLVEEAAKTAPGKKRPVEPSPQRSPDSSTGIGKKGQQPAKKRLNFGQTGDSESVPDPQPIGEPPAGPSGLGSGTMAAGGGAPMADNNEGADGVGNASGNWHCDSTWLGDRVITTSTRTWALPTYNNHLYKQISSASTGASNDNHYFGYSTPWGYFDFNRFHCHFSPRDWQRLINNNWGFRPKRLNFKLFNIQVKEVTTNDGVTTIANNLTSTVQVFSDSEYQLPYVLGSAHQGCLPPFPADVFMIPQYGYLTLNNGSQAVGRSSFYCLEYFPSQMLRTGNNFTFSYTFEEVPLHSSYAHSQSLDRLMNPLIDQYLYYLNRTQNQSGSAQNKDLLFSRGSPAGMSVQPKNWLPGPCYRQQRVSKTKTDNNNSNFTWTGASKYNLNGRESIINPGTAMASHKDDEDKFFPMSGVMIFGKESAGASNTALDNVMITDEEEIKATNPVATERFGTVAVNFQSSSTDPATGDVHAMGALPGMVWQDRDVYLQGPIWAKIPHTDGHFHPSPLMGGFGLKNPPPQILIKNTPVPANPPAEFSATKFASFITQYSTGQVSVEIEWELQKENSKRWNPEVQYTSNYAKSASVDFTVDNNGLYTEPRPIGTRYLTRPL

SEQ ID NO: 263 - DNA, 2214 bp, Adeno-associated virus
atggctgctgacggttatcttccagattggctcgaggacaacctctctgagggcattcgcgagtggtgggacctgaaacctggagcccccaagcccaaggccaaccagcagaagcaggacgacggccggggtctggtgcttcctggctacaagtacctcggacccttcaacggactcgacaagggggagcccgtcaacgcggcggacgcagcggccctcgagcacgacaaggcctacgaccagcagctcaaagcgggtgacaatccgtacccgcggtataaccacgccgacgccgagtttcaggagcgtctgcaagaagatacgccttttgggggcaacctcgggcgagcagtcttccaggccaagaagcgggttctcgaacctctcggtctggttgaggaagctgctaagacggctcctggaaagaagagaccggtagaaccgtcacctcagcgttcccccgactcctccacgggcatcggcaagaaaggccagcagcccgctaaaaagagactgaactttggtcagactggcgactcagagtcagtccccgaccctcaaccaatcggagaaccaccagcaggcccctctggtctgggatctggtacaatggctgcaggcggtggcgctccaatggcagacaataacgaaggcgccgacggagtgggtaatgcctcaggaaattggcattgcgattccacatggctgggcgacagagtcatcaccaccagcacccgcacctgggccttgcccacctacaataaccacctctacaagcaaatctccagtgcttcaacgggggccagcaacgacaaccactacttcggctacagcaccccctgggggtattttgatttcaacagattccactgccacttttcaccacgtgactggcagcgactcatcaacaacaattggggattccggcccaagagactcaacttcaaactcttcaacatccaagtcaaggaggtcacgacgaatgatggcgtcacaaccatcgctaataaccttaccagcacggttcaagtcttctcggactcggagtaccagcttccgtacgtcctcggctctgcgcaccagggctgcctccctccgttcccggcggacgtgttcatgattccgcaatacggctacctgacgctcaacaatggcagccaagccgtgggacgttcatccttttactgcctggaatatttcccttctcagatgctgagaacgggcaacaactttaccttcagctacacctttgaggaagtgcctctccacagcagctacgcgcacagccagagcctggaccggctgatgaatcctctcatcgtccaatacctgtattacctgaacagaactcaaaatcagtccggaagtgcccaaaacaaggacttgctgttcagccgtgggtctccagctggcatgtctgttcagcccaaaaactggctacctggaccctgttatcggcagcagcgcgtttctaaaacaaaaacagacaacaacaacagcaattttacctggactggtgcttcaaaatataacctcaatgggcgtgaatccatcatcaaccctggcactgctatggcctcacacaaagacgacgaagacaagttctttcccatgagcggtgtcatgatttttggaaaagagagcgccggagcttcaaacactgcattggacaatgtcatgattacagacgaagaggaaattaaagccactaaccctgtggccaccgaaagatttgggaccgtggcagtcaatttccagagcagcagcacagaccctgcgaccggagatgtgcatgctatgggagcattacctggcatggtgtggcaagatagagacgtgtacctgcagggtcccatttgggccaaaattcctcacacagatggacactttcacccgtctcctcttatgggcggctttggactcaagaacccgcctcctcagatcctcatcaaaaacacgcctgttcctgcgaatcctccggcggagttttcagctacaaagtttgcttcattcatcacccaatactccacaggacaagtgagtgtggaaattgaatgggagctgcagaaagaaaacagcaagcgctggaatcccgaagtgcagtacacatccaattatgcaaaatctgccagcgttgattttactgtggacaacaatggactttatactgagcctcgccccattggcacccgttaccttacccgtcccctgtaa

SEQ ID NO: 264 - protein, 736 aa, Adeno-associated virus
MAADGYLPDWLEDTLSEGIRQWWKLRPGPPPPKPAERHKDDSRGLVLPGYKYLGPFNGLDKGEPVNEADAAALEHDKAYDRQLDSGDNPYLKYNHADAEFQERLKEDTSFGGNLGRAVFQAKKRVLEPLGLVEEGAETAPGKKRPVEQSPQGPDSSSGIGKTGQQPAKKRLNFGQTGDSESVPDPQPLGEPPATPAAVGPTTMASGGGAPMADNNEGADGVGNASGNWHCDSTWLGDRVITTSTRTWALPTYNNHLYKQISSASTGASNDNHYFGYSTPWGYFDFNRFHCHFSPRDWQRLINNNWGFRPKRLNFKLFNIQVKEVTTNDGVTTIANNLTSTVQVFSDSEYQLPYVLGSAHQGCLPPFPADVFMIPQYGYLTLNNGSQAVGRSSFYCLEYFPSQMLRTGNNFTFSYTFEEVPFHSSYAHSQSLDRLMNPLIDQYLYYPNRTQNQSGSAQNKDLLFSRGSPAGMSVQPKNWLPGPCYRQQRVSKTKTDNNNSNFTWTGASKYNLNGRESIINPGTAMASHKDDEDKFFPMSGVMIFGKESAGASNTALDNVMITDEEEIKATNPVATERFGTVAVNFQSSSTDPATGDVHAMGALPGMVWQGRDVYLQGPIWAKIPHTDGHFHPSPLMGGFGLKNPPPQILIKNTPVPANPPAEFSATKFASFITQYSTGQVSVEIEWELQKENSKRWNPEVQYTSNYAKSANVDFTVDNNGLYTEPRPIGTRYLTRPL

SEQ ID NO: 265 - DNA, 2211 bp, Adeno-associated virus
atggctgccgatggttatcttccagattggctcgaggacactctctctgaaggaataagacagtggtggaagctcagacctggcccaccaccaccaaagcccgcagagcggcataaggacgacagcaggggtcttgtgcttcctgggtacaagtacctcggacccttcaacggactcgacaagggagagccggtcaacgaggcagacgccgcggccctcgagcacgacaaagcctacgaccggcagctcgacagcggagacaacccgtacctcaagtacaaccacgccgacgcggagtttcaggagcgccttaaagaagatacgtcttttgggggcaacctcgggcgagcagtcttccaggccaagaagcgggttctcgaacctctcggtctggttgaggaaggcgctgagacggctcctggaaagaaacgtccggtagagcagtcgccacaagggccagactcctcctcgggcatcggcaagacaggccagcagcccgctaaaaagagactcaattttggtcagactggcgactcagagtcagtccccgatccacaacctctcggagaacctccagcaacccccgctgctgtgggacctactacaatggcttcaggcggtggcgcaccaatggcagacaataacgaaggcgccgacggagtgggtaatgcctcaggaaattggcattgcgattccacatggctgggcgacagagtcatcaccaccagcacccgcacctgggccttgcccacctacaataaccacctctacaagcaaatctccagtgcttcaacgggggccagcaacgacaaccactacttcggctacagcaccccctgggggtattttgatttcaacagattccactgccacttttcaccacgtgactggcagcgactcatcaacaacaattggggattccggcccaagagactcaacttcaaactcttcaacatccaagtcaaggaggtcacgacgaatgatggcgtcacaaccatcgctaataaccttaccagcacggttcaagtcttctcggactcggagtaccagcttccgtacgtcctcggctctgcgcaccagggctgcctccctccgttcccggcggacgtgttcatgattccgcaatacggctacctgacgctcaacaatggcagccaagccgtgggacgttcatccttttactgcctggaatatttcccttctcagatgctgagaacgggcaacaactttaccttcagctacacctttgaggaagtgcctttccacagcagctacgcgcacagccagagcctggaccggctgatgaatcctctcatcgaccaatacctgtattacccgaacagaactcaaaatcagtccggaagtgcccaaaacaaggacttgctgtttagccgtgggtctccagctggcatgtctgttcagcccaaaaactggctacctggaccctgttatcggcagcagcgcgtttctaaaacaaaaacagacaacaacaacagcaattttacctggactggtgcttcaaaatataacctcaatgggcgtgaatccatcatcaaccctggcactgctatggcctcacacaaagacgacgaagacaagttctttcccatgagcggtgtcatgatttttggaaaagagagcgccggagcttcaaacactgcattggacaatgtcatgattacagacgaagaggaaattaaagccactaaccctgtggccaccgaaagatttgggaccgtggcagtcaatttccagagcagcagcacagaccctgcgaccggagatgtgcatgctatgggagcattacctggcatggtgtggcaaggtagagacgtgtacctgcagggtcccatttgggccaaaattcctcacacagatggacactttcacccgtctcctcttatgggcggctttggactcaagaacccgcctcctcagatcctcatcaaaaacacgcctgttcctgcgaatcctccggcggagttttcagctacaaagtttgcttcattcatcacccaatactccacaggacaagtgagtgtggaaattgaatgggagctgcagaaagaaaacagcaagcgctggaatcccgaagtgcagtacacatccaattatgcaaaatctgccaacgttgattttactgtggacaacaatggactttatactgagcctcgccccattggcacccgttaccttacccgtcccctgtaa

SEQ ID NO: 266 - protein, 736 aa, Adeno-associated virus
MAADGYLPDWLEDTLSEGIRQWWKLRPGPPPPKPAERHKDDSRGLVLPGYKYLGPFNGLDKGEPVNEADAAALEHDKAYDRQLDSGDNPYLKYNHADAEFQERLKEDTSFGGNLGRAVFQAKKRVLEPLGLVEEGAKTAPGKKRPVEQSPQGPDSSSGIGKTGQQPAKKRLNFGQTGDSESVPDPQPLGEPPATPAAVGPTTMASGGGAPMADNNEGADGVGNASGNWHCDSTWLGDRVITTSTRTWALPTYNNHLYKQISSASTGASNDNHYFGYSTPWGYFDFNRFHCHFSPRDWQRLINNNWGFRPKRLNFKLFNIQVKEVTTNDGVTTIANNLTSTVQVFSDSEYQLPYVLGSAHQGCLPPFPADVFMIPQYGYLTLNNGSQAVGRSSFYCLEYFPSQMLRTGNNFTFSYTFEEVPFHSSYAHSQSLDRLMNPLIDQYLYYPNRTQNQSGSAQNKDLLFSRGSPAGMSVQPKNWLPGPCYRQQRVSKTKTDNNNSNFTWTGASKYNLNGRESIINPGTAMASHKDDEDKFFPMSGVMIFGKESAGASNTALDNVMITDEEEIKATNPVATERFGTVAVNFQSSSTDPATGDVHAMGALPGMVWQGRDVYLQGPIWAKIPHTDGHFHPSPLMGGFGLKNPPPQILIKNTPVPANPPAEFSATKFASFITQYSTGQVSVEIEWELQKENSKRWNPEVQYTSNYAKSANVDFTVDNNGLYTEPRPIGTRYLTRPL

SEQ ID NO: 267 - protein, 736 aa, Adeno-associated virus
MAADGYLPDWLEDTLSEGIRQWWKLRPGPPPPKPAERHKDDSRGLVLPGYKYLGPFNGLDKGEPVNEADAAALEHDKAYDRQLDSGDNPYLKYNHADAEFQERLKEDTSFGGNLGRAVFQAKKRVLEPLGLVEEGAKTAPGKKRPVEQSPQGPDSSSGIGKTGQQPAKKRLNFGQTGDSESVPDPQPLGEPPATPAAVGPTTMASGGGAPMADNNEGADGVGNASGNWHCDSTWLGDRVITTSTRTWALPTYNNHLYKQISSASTGASNDNHYFGYSTPWGYFDFNRFHCHFSPRDWQRLINNNWGFRPKRLNFKLFNIQVKEVTTNDGVTTIANNLTSTVQVFSDSEYQLPYVLGSAHQGCLPPFPADVFMIPQYGYLTLNNGSQAVGRSSFYCLEYFPSQMLRTGNNFTFSYTFEEVPFHSSYAHSQSLDRLMNPLIDQYLYYLNRTQNQSGSAQNKDLLFSRGSPAGMSVQPKNWLPGPCYRQQRVSKTKTDNNNSNFTWTGASKYNLNGRESIINPGTAMASHKDDEDKFFPMSGVMIFGKESAGASNTALDNVMITDEEEIKATNPVATERFGTVAVNFQSSSTDPATGDVHAMGALPGMVWQGRDVYLQGPIWAKIPHTDGHFHPSPLMGGFGLKNPPPQILIKNTPVPANPPAEFSATKFASFITQYSTGQVSVEIEWELQKENSKRWNPEVQYTSNYAKSANVDFTVDNNGLYTEPRPIGTRYLTRPL

SEQ ID NO: 268 - protein, 736 aa, Adeno-associated virus
MAADGYLPDWLEDTLSEGIRQWWKLRPGPPPPKPAERHKDDSRGLVLPGYKYLGPFNGLDKGEPVNEADAAALEHDKAYDRQLDSGDNPYLKYNHADAEFQERLKEDTSFGGNLGRAVFQAKKRVLEPLGLVEEGAKTAPGKKRPVEQSPQGPDSSSGIGKTGQQPAKKRLNFGQTGDSESVPDPQPLGEPPATPAAVGPTTMASGGGAPMADNNEGADGVGNASGNWHCDSTWLGDRVITTSTRTWALPTYNNHLYKQISSASTGASNDNHYFGYSTPWGYFDFNRFHCHFSPRDWQRLINNNWGFRPKRLNFKLFNIQVKEVTTNDGVTTIANNLTSTVQVFSDSEYQLPYVLGSAHQGCLPPFPADVFMIPQYGYLTLNNGSQAVGRSSFYCLEYFPSQMLRTGNNFTFSYTFEEVPFHSSYAHSQSLDRLMNPLIDQYLYYLNRTQNQSGSAQNKDLLFSRGSPAGMSVQPKNWLPGPCYRQQRVSKTKTDNNNSNFTWTGASKYNLNGRESIINPGTAMASHKDDEDKFFPMSGVMIFGKESAGASNTALDNVMITDEEEIKATNPVATERFGTVAVNFQSSSTDPATGDVHAMGALPGMVWQDRDVYLQGPIWAKIPHTDGHFHPSPLMGGFGLKNPPPQILIKNTPVPANPPAEFSATKFASFITQYSTGQVSVEIEWELQKENSKRWNPEVQYTSNYAKSANVDFTVDNNGLYTEPRPIGTRYLTRPL

SEQ ID NO: 269 - DNA, 2208 bp, Adeno-associated virus
atggctgccgatggctatcttccagattggctcgaggacactctctctgaaggaataagacagtggtggaagctcaaacctggcccaccaccaccaaagcccgcagagcggcatagggacgacagcaggggtcttgtgcttcctgggtacaagtacctcggacccttcaacggactcgacaagggagagccggtcaacgaggcagacgccgcggccctcgagcacgacaaagcctacgaccggcagctcgacagcggagacaacccgtacctcaagtacaaccacgccgacgcggagtttcaggagcgccttaaagaagatacgtcttttgggggcaacctcggacgagcagtcttccaggcgaaaaagagggttcttgaacctctgggcctggttgaggaacctgttaagacggctccgggaaaaaagaggccggtagagcactctcctgtggagccagactcctcctcgggaaccggaaaggcgggccagcagcctgcaagaaaaagattgaattttggtcagactggagacgcagactcagtacctgacccccagcctctcggacagccaccagcagccccctctggtctgggaactaatacgatggctacaggcagtggcgcaccaatggcagacaataacgagggcgccgacggagtgggtaattcctcgggaaattggcattgcgattccacatggatgggcgacagagtcatcaccaccagcacccgaacctgggccctgcccacctacaacaaccacctctacaaacaaatttccagccaatcaggagcctcgaacgacaatcactactttggctacagcaccccttgggggtattttgacttcaacagattccactgccacttttcaccacgtgactggcaaagactcatcaacaacaactggggattccgacccaagagactcaacttcaagctctttaacattcaagtcaaagaggtcacgcagaatgacggtacgacgacgattgccaataaccttaccagcacggttcaggtgtttactgactcggggtaccagctcccgtacgtcctcggctcggcgcatcaaggatgcctcccgccgttcccagcagacgtcttcatggtgccacagtatggataccccaccctgaacaacgggagtcaggcagtaggacgctcttcattttactgcctggagtactttccttctcagatgctgcgtaccggaaacaactttaccttcagctacacttttgaggacgttcctttccacagcagctacgctcacagccagagtctggaccgtctcatgaatcctctcatcgaccagtacctgtattacttgagcacaacaaacactccaagtggaaccaccacgcagtcaaggcttcagttttctcaggccggagcgagtgacattcgggaccagtctaggaactggcttcctggaccctgttaccgccagcagcgagtatcaaagacatctgcggataacaacaacagtgaatactcgtggactggagctaccaagtaccacctcaatggcagagactctctggtgaatccgggcccggccgtggcaagccacaaggacgatgaagaaaagttttttcctcagagcggggttctcatctttgggaagcaaggctcagagaaaacaaatgtggacattgaaaaggtcatgattacagacgaagaggaaatcaggacaaccaatcccgtggctacggagcagtatggttctgtatctaccaacctccagagaggcaacagacaagcagctaccgcagatgtcaacacacaaggcgttcttccaggcatggtctggcaggacagagatgtgtaccttcaggggcccatctgggcaaagattccacacacggacggacattttcacccctctcccctcatgggtggattcggacttaaacaccctcctccacagattctcatcaagaacaccccggtacctgcgaatccttcgaccaccttcagtgcggcaaagtttgcttccttcatcacacagtactccacgggacaggtcagcgtggagatcgagtgggagctgcagaaggaaaacagcaaacgctggaatcccgaaattcagtacacttccaactacaacaagtctgttaatgtggactttactgtggacactaatggcgtgtattcagagcctcgccccattggcaccagatacctgactcgtaatctgtaa

SEQ ID NO: 270 - protein, 735 aa, Adeno-associated virus
MAADGYLPDWLEDTLSEGIRQWWKLKPGPPPPKPAERHRDDSRGLVLPGYKYLGPFNGLDKGEPVNEADAAALEHDKAYDRQLDSGDNPYLKYNHADAEFQERLKEDTSFGGNLGRAVFQAKKRVLEPLGLVEEPVKTAPGKKRPVEHSPVEPDSSSGTGKAGQQPARKRLNFGQTGDADSVPDPQPLGQPPAAPSGLGTNTMATGSGAPMADNNEGADGVGNSSGNWHCDSTWMGDRVITTSTRTWALPTYNNHLYKQISSQSGASNDNHYFGYSTPWGYFDFNRFHCHFSPRDWQRLINNNWGFRPKRLNFKLFNIQVKEVTQNDGTTTIANNLTSTVQVFTDSGYQLPYVLGSAHQGCLPPFPADVFMVPQYGYPTLNNGSQAVGRSSFYCLEYFPSQMLRTGNNFTFSYTFEDVPFHSSYAHSQSLDRLMNPLIDQYLYYLSTTNTPSGTTTQSRLQFSQAGASDIRDQSRNWLPGPCYRQQRVSKTSADNNNSEYSWTGATKYHLNGRDSLVNPGPAVASHKDDEEKFFPQSGVLIFGKQGSEKTNVDIEKVMITDEEEIRTTNPVATEQYGSVSTNLQRGNRQAATADVNTQGVLPGMVWQDRDVYLQGPIWAKIPHTDGHFHPSPLMGGFGLKHPPPQILIKNTPVPANPSTTFSAAKFASFITQYSTGQVSVEIEWELQKENSKRWNPEIQYTSNYNKSVNVDFTVDTNGVYSEPRPIGTRYLTRNL

SEQ ID NO: 271 - DNA, 2211 bp, Adeno-associated virus
atggctgccgacggttatcttccagattggctcgaggacactctctctgaaggaataagacagtggtggaagctcaaacctggcccaccaccaccaaagcccgcagagcggcataaggacgacagcaggggtcttgtgcttcctgggtacaagtacctcggacccttcaacggactcgacaagggagagccggtcaacgaggcagacgccgcggccctcgagcacgacaaagcctacgaccggcagctcgacagcggagacaacccgtacctcaagtacaaccacgccgacgcggagtttcaggagcgccttaaagaagatacgtcttttgggggcaacctcgggcgggcagtcttccaggccaagaagcgggttctcgaacctctcggtctggttgaggaaggcgctaagacggctcctggaaagaaacgtccggtagagcagtcgccacaagagccagactccccctcgggcatcggcaagacaggccagcagcccgctaaaaagagactcaattttggtcagactggcgactcagagtcagtccccgatccacaacctctcggagaacctccagcaacccccgctgctgtgggacctactacaatggcttcaggcggtggcgcaccaatggcagacaataacgaaggcgccgacggagtgggtaatgcctcaggaaattggcactgcgattccacatggctgggcgacagagtcatcaccaccagcacccgcacctgggccttgcccacctacaataaccacctctacaagcaaatctccagtgcttcaacgggggccagcaacgacaaccactacttcggctacagcaccccctgggggtattttgatttcaacagattccactgccacttttcaccacgtgactggcagcgactcatcaacaacaattggggattccggcccaagagactcaacttcaaactcttcaacatccaagtcaaggaggtcacgacgaatgatggcgtcacaaccatcgctaataaccttaccagcacggttcaagtcttctcggactcggagtaccagcttccgtacgtcctcggctctgcgcaccagggccgcctccctccgttcccggcggacgtgttcatgattccgcaatacggctacctgacgctcaacaatggcagccaagccgtgggacgttcatcctcttactgcctggaatatttcccttctcagatgctgagaacgggcaacaactttaccttcagctacacctttgaggaagtgcctctccacagcagctgcgcgcacagccagagcctggaccggctgatgaatcctctcatcgaccaatacctgtattacctgaacagaactcaaaatcagtccggaagtgcccaaaacagggacttgctgttcagccgtgggtctccagctggcatgtctgttcagcccaaaaactggctacctggaccctgttatcggcagcagcgcgtttctaaaacaaaaacagacaacaacaacagcaattttacctggactggtgcttcaaaatataacctcaatgggcgtgaatccatcatcaaccctggcactgctatggcctcacacaaagacgacgaagacaagttctttcccatgagcggtgtcatgatttttggaaaagagagcgccggagcttcaaacactgcattggacaatgtcatgattacagacgaagaggaaattaaagccactaaccctgtggccaccgaaagatttgggaccgtggcagtcaatttccagagcagcagcacagaccctgcgaccggagatgtgcatgctatgggagcattacctggcatggtgtggcaagatagagacgtgtacctgcagggtcccatttgggccaaaattcctcacacagatggacactttcacccgtctcctcttatgggcggctttggactcaagaacccgcctcctcagatcctcatcaaaaacacgcctgttcctgcgaatcctccggcggagttttcagctacaaagtttgcttcattcatcacccaatactccgcaggacaagtgagtgtggaaattgaatgggagctgcagaaagaaaacagcaagcgctggaatcccgaagtgcagtacacatccaattatgcaaaatctgccaacgttgattttactgtggacaacaatggactttatactgagcctcgccccattggcacccgttaccttacccgtcccctgtaa

SEQ ID NO: 272 - protein, 736 aa, Adeno-associated virus
MAADGYLPDWLEDTLSEGIRQWWKLKPGPPPPKPAERHKDDSRGLVLPGYKYLGPFNGLDKGEPVNEADAAALEHDKAYDRQLDSGDNPYLKYNHADAEFQERLKEDTSFGGNLGRAVFQAKKRVLEPLGLVEEGAKTAPGKKRPVEQSPQEPDSPSGIGKTGQQPAKKRLNFGQTGDSESVPDPQPLGEPPATPAAVGPTTMASGGGAPMADNNEGADGVGNASGNWHCDSTWLGDRVITTSTRTWALPTYNNHLYKQISSASTGASNDNHYFGYSTPWGYFDFNRFHCHFSPRDWQRLINNNWGFRPKRLNFKLFNIQVKEVTTNDGVTTIANNLTSTVQVFSDSEYQLPYVLGSAHQGRLPPFPADVFMIPQYGYLTLNNGSQAVGRSSSYCLEYFPSQMLRTGNNFTFSYTFEEVPLHSSCAHSQSLDRLMNPLIDQYLYYLNRTQNQSGSAQNRDLLFSRGSPAGMSVQPKNWLPGPCYRQQRVSKTKTDNNNSNFTWTGASKYNLNGRESIINPGTAMASHKDDEDKFFPMSGVMIFGKESAGASNTALDNVMITDEEEIKATNPVATERFGTVAVNFQSSSTDPATGDVHAMGALPGMVWQDRDVYLQGPIWAKIPHTDGHFHPSPLMGGFGLKNPPPQILIKNTPVPANPPAEFSATKFASFITQYSAGQVSVEIEWELQKENSKRWNPEVQYTSNYAKSANVDFTVDNNGLYTEPRPIGTRYLTRPL

SEQ ID NO: 273 - protein, 736 aa, Adeno-associated virus
MAADGYLPDWLEDTLSEGIRQWWKLKPGPPPPKPAERHKDDSRGLVLPGYKYLGPFNGLDKGEPVNEADAAALEHDKAYDRQLDSGDNPYLKYNHADAEFQERLKEDTSFGGNLGRAVFQAKKRVLEPLGLVEEGAKTAPGKKRPVEQSPQEPDSSSGIGKTGQQPAKKRLNFGQTGDSESVPDPQPLGEPPATPAAVGPTTMASGGGAPMADNNEGADGVGNASGNWHCDSTWLGDRVITTSTRTWALPTYNNHLYKQISSASTGASNDNHYFGYSTPWGYFDFNRFHCHFSPRDWQRLINNNWGFRPKRLNFKLFNIQVKEVTTNDGVTTIANNLTSTVQVFSDSEYQLPYVLGSAHQGCLPPFPADVFMIPQYGYLTLNNGSQAVGRSSFYCLEYFPSQMLRTGNNFTFSYTFEEVPLHSSCAHSQSLDRLMNPLIDQYLYYLNRTQNQSGSAQNRDLLFSRGSPAGMSVQPKNWLPGPCYRQQRVSKTKTDNNNSNFTWTGASKYNLNGRESIINPGTAMASHKDDEDKFFPMSGVMIFGKESAGASNTALDNVMITDEEEIKATNPVATERFGTVAVNFQSSSTDPATGDVHAMGALPGMVWQDRDVYLQGPIWAKIPHTDGHFHPSPLMGGFGLKNPPPQILIKNTPVPANPPAEFSATKFASFITQYSTGQVSVEIEWELQKENSKRWNPEVQYTSNYAKSANVDFTVDNNGLYTEPRPIGTRYLTRPL

SEQ ID NO: 274 - DNA, 2208 bp, Adeno-associated virus
atggctgccgatggctatcttccagattggctcgaggacactctctctgaaggaataagacagtggtggaagctcaaacctggcccaccaccaccaaagcccgcagagcggcatagggacgacagcaggggtcttgtgcttcctgggtacaagtacctcggacccttcaacggactcgacaagggagagccggtcaacgaggcagacgccgcggccctcgagcacgacaaagcctacgaccggcagctcgacagcggagacaacccgtacctcaagtacaaccacgccgacgcggagtttcaggagcgccttaaagaagatacgtcttttgggggcaacctcggacgagcagtcttccaggcgaaaaagagggttcttgaacctctgggcctggttggggaacctgttaagacggctccgggaaaaaagaggccggtagagcactctcctgtggagccagactcctcctcgggaaccggaaaggcgggccagcagcctgcaagaaaaagattgaattttggtcagactggagacgcagactcagtacctgacccccagcctctcggacagccaccagcagccccctctggtctgggaactaatacgatggctacaggcagtggcgcaccaatggcagacaataacgagggcgccgacggagtgggtaattcctcgggaaattggcattgcgattccacatggatgggcgacagagtcatcaccaccagcacccgaacctgggccctgcccacctacaacaaccacctctacaaacaaatttccagccaatcaggagcctcgaacgacagtcactactttggctacagcaccccttgggggtattttgacttcaacagattccactgccacttttcaccacgtgactggcaaagactcatcaacaacaactggggattccgacccaagagactcaacttcaagctctttaacattcaagtcaaagaggtcacgcagaatgacggtacgacgacgattgccaataaccttaccagcacggttcaggtgtttactgactcggagtaccagctcccgtacgtcctcggctcggcgcatcaaggatgcctcccgccgttcccagcagacgtcttcatggtgccacagtatggatacctcaccctgaacaacgggagtcaggcagtaggacgctcttcattttactgcctggagtactttccttctcagatgctgcgtaccggaaacaactttaccttcagctacacttttgaggacgttcctttccacagcagctacgctcacagccagagtctggaccgtctcatgaatcctctcatcgaccagtacctgtattacttgagcacaacaaacactccaagtggaaccaccacgcagtcaaggctccagttttctcaggccggagcgagtgacattcgggaccagtctaggaactggcttcctggaccctgttaccgccagcagcgagtatcaaagacatctgcggataacaacaacagtgaatactcgtggactggagctaccaagtaccacctcaatggcagagactctctggtgaatccgggcccggccatggcaagccacaaggacaatgaagaaaagttttttcctcagagcggggttctcatctttgggaagcaaggctcagagaaaacaaatgtggacattgaaaaggtcatgattacagacgaagaggaaatcaggacaaccaatcccgtggctacggagcagtatggttctgtatctaccaacctccagagaggcaacagacaagcagctaccgcagatgtcaacacacaaggcgttcttccaggcatggtctggcaggacagagatgtgtaccttcaggggcccatctgggcaaagattccacacacggacggacattttcacccctctcccctcatgggtggattcggacttaaacaccctcctccacagattctcatcaagaacaccccggtacctgcgaatccttcgaccaccttcagtgcggcaaagtttgcttccttcatcacacagtactccacgggacaggtcagcgtggagatcgagtgggagctgcagaaggaaaacagcaaacgctggaatcccgaaattcagtacacttccaactacaacaagtctgttaatgtggactttactgtggacactaatggcgtgtattcagagcctcgccccattggcaccagatacctgactcgtaatctgtaa

SEQ ID NO: 275 - protein, 735 aa, Adeno-associated virus
MAADGYLPDWLEDTLSEGIRQWWKLKPGPPPPKPAERHRDDSRGLVLPGYKYLGPFNGLDKGEPVNEADAAALEHDKAYDRQLDSGDNPYLKYNHADAEFQERLKEDTSFGGNLGRAVFQAKKRVLEPLGLVGEPVKTAPGKKRPVEHSPVEPDSSSGTGKAGQQPARKRLNFGQTGDADSVPDPQPLGQPPAAPSGLGTNTMATGSGAPMADNNEGADGVGNSSGNWHCDSTWMGDRVITTSTRTWALPTYNNHLYKQISSQSGASNDSHYFGYSTPWGYFDFNRFHCHFSPRDWQRLINNNWGFRPKRLNFKLFNIQVKEVTQNDGTTTIANNLTSTVQVFTDSEYQLPYVLGSAHQGCLPPFPADVFMVPQYGYLTLNNGSQAVGRSSFYCLEYFPSQMLRTGNNFTFSYTFEDVPFHSSYAHSQSLDRLMNPLIDQYLYYLSTTNTPSGTTTQSRLQFSQAGASDIRDQSRNWLPGPCYRQQRVSKTSADNNNSEYSWTGATKYHLNGRDSLVNPGPAMASHKDNEEKFFPQSGVLIFGKQGSEKTNVDIEKVMITDEEEIRTTNPVATEQYGSVSTNLQRGNRQAATADVNTQGVLPGMVWQDRDVYLQGPIWAKIPHTDGHFHPSPLMGGFGLKHPPPQILIKNTPVPANPSTTFSAAKFASFITQYSTGQVSVEIEWELQKENSKRWNPEIQYTSNYNKSVNVDFTVDTNGVYSEPRPIGTRYLTRNL

SEQ ID NO: 276 - protein, 737 aa, Adeno-associated virus
RMAADGYLPDWLEDNLSEGIREWWDLKPGAPKPKANQQKQDDGRGLVLPGYKYLGPFNGLDKGEPVNAADAAALEHDKAYDQQLKAGDNPYLRYNHADAEFQERLQEDTSFGGNLGRAVFQAKKRVLEPLGLVEEGAKTAPGKKRPVEQSPQEPDSSSGIGKTGQQPAKKRLNFGQTGDSESVPDPQPLGEPPATPAAVGPTTMASGGGAPMADNNEGADGVGNASGNWHCDSTWLGDRVITTSTRTWALPTYNNHLYKQISSTSTGASNDNHYFGYGTPWGYFDFNRFHCHFSPRDWQRLINNNWGFRPKRLNFKLFNIQVEEVTTNDGVTTIANNLTSTVQVFSDSEYQLPYVLGSAHQGCLPPFPADVFMIPQYGYLTLNNGSQAVGRSSFYCLEYFPSQMLRTGNNFTFSYTFEEVPFHSSYAHSQSLDRLMNPLIDQYLYYLNRTQNQSGSAQNKDLLFSRGSPAGMSVQPKNWLPGPCYRQQRVSKTKTDNNNSNFTWTGASKYNLNGRESIINPGTAVASHKDDEDKFFPMSGVMIFGKESAGASSTALDNVMITDEEEIKATNPVATERFGTVAVNFQSSSTDPATGDVHAMGALPGMVWQDRDVYLQGPIWAKIPHTDGHFHPSPLMGGFGLKNPPPQILIKNTPVPANPPAEFSATKFASFITQYSTGQVSVEIEWELQKENSKRWNPEVQYTSNYAKSANVDFTVDNNGLYTEPRPIGTRYLTRPL

SEQ ID NO: 277 - protein, 736 aa, Adeno-associated virus
MAADGYLPDWLEDNLSEGIREWWDLKPGAPKPKANQQKQDDGRGLVLPGYKYLGPFNGLDKGEPVNAADAAALEHDKAYDQQLKAGDNPYLRYNHADAEFQERLQEDTSFGGNLGRAVFQAKKRVLEPLGLVEEGAKTAPGKKRPVEQSPQEPDSSSGIGKTGQQPAKKRLNFGQTGDSESVPDPQPLGEPPATPAAVGPTTMASGGGAPMADNNEGADGVGNASGNWHCDSTWLGDRVITTSTRTWALPTYNNHLYKQISSTSTGASNDNHYFGYGTPWGYFDFNRFHCHFSPRDWQRLINNNWGFRPKRLNFKLFNIQVEEVTTNDGVTTIANNLTSTVQVFSDSEYQLPYVLGSAHQGCLPPFPADVFMIPQYGYLTLNNGSQAVGRSSFYCLEYFPSQMLRTGNNFTFSYTFEEVPFHSSYAHSQSLDRLMNPLIDQYLYYLNRTQNQSGSAQNKDLLFSRGSPAGMSVQPKNWLPGPCYRQQRVSKTKTDNNNSNFTWTGASKYNLNGRESIINPGTAVASHKDDEDKFFPMSGVMIFGKESAGASSTALDNVMITDEEEIKATNPVATERFGTVAVNFQSSSTDPATGDVHAMGALPGMVWQDRDVYLQGPIWAKIPHTDGHFHPSPLMGGFGLKNPPPQILIKNTPVPANPPAEFSATKFASFITQYSTGQVSVEIEWELQKENSKRWNPEVQYTSNYAKSANVDFTVDNNGLYTEPRPIGTRYLTRPL

SEQ ID NO: 278 - DNA, 2211 bp, Adeno-associated virus
atggctgccgatggttatcttccagattggctcgaggacaacctctctgagggcattcgcgagtggtgggacttgaaacctggagccccgaagcccaaagccaaccagcaaaagcaggacgacggccggggtctggtgcttcctggctacaagtacctcggacccttcaacggactcgacaagggggagcccgtcaacgcggcggacgcagcggccctcgagcacgacaaggcctacgaccagcagctcaaagcgggtgacaatccgtacctgcggtataaccacgccgacgccgagtttcaggagcgtctgcaagaagatacgtcttttgggggcaacctcgggcgagcagtcttccaggccaagaagcgggttctcgaacctctcggtctggttgaggaaggcgctaagacggctcctggaaagaaacgtccggtagagcagtcgccacaagagccagactcctcctcgggcatcggcaagacaggccagcagcccgctaaaaagagactcaattttggccagactggcgactcagagtcagtccccgatccacaacctctcggagaacctccagcaacccccgctgctgtgggacctactacaatggcttcaggcggtggcgcaccaatggcagacaataacgaaggcgccgacggagtgggtaatgcctcaggaaattggcattgcgattccacatggctgggcgacagagtcatcaccaccagcacccgcacctgggccttgcccacctacaataaccacctctacaagcaaatctccagtacttcaacgggggccagcaacgacaaccactacttcggctacggcaccccctgggggtattttgatttcaacagattccactgccacttttcaccacgtgactggcagcgactcatcaacaacaattggggattccggcccaagagactcaacttcaaactcttcaacatccaagtcgaggaggtcacgacgaatgatggcgtcacaaccatcgctaataaccttaccagcacggttcaagtcttctcggactcggagtaccagcttccgtacgtcctcggctctgcgcaccagggctgcctccctccgttcccggcggacgtgttcatgattccgcaatacggctacctgacgctcaacaatggcagccaagccgtgggacgttcatccttttactgcctggaatatttcccttctcagatgctgagaacgggcaacaactttaccttcagctacacctttgaggaagtgcctttccacagcagctacgcgcacagccagagcctggaccggctgatgaatcctctcatcgaccaatacctgtattacctgaacagaacacaaaatcagtccggaagtgcccaaaacaaggacttgctgtttagccgtgggtctccagctggcatgtctgttcagcccaaaaactggctacctggaccctgttatcggcagcagcgcgtttctaaaacaaaaacagacaacaacaacagcaattttacctggactggtgcttcaaaatataacctcaatgggcgtgaatccatcatcaaccctggcaccgctgtggcctcacacaaagacgacgaagacaagttctttcccatgagcggtgtcatgatttttggaaaagagagcgccggagcttcaagcactgcattggacaatgtcatgattacagacgaagaggaaattaaagccactaaccctgtggccaccgaaagatttgggaccgtggcagtcaatttccagagcagcagcacagaccctgcgaccggagatgtgcatgctatgggagcattacctggcatggtgtggcaagatagagacgtgtacctgcagggtcccatttgggccaaaattcctcacacagatggacactttcacccgtctcctcttatgggcggctttggactcaagaacccgcctcctcagatcctcatcaaaaacacgcctgttcctgcgaatcctccggcggagttttcagctacaaagtttgcttcattcatcacccaatactccacaggacaagtgagtgtggaaattgaatgggagctgcagaaagaaaacagcaagcgctggaatcccgaagtgcagtacacatccaattatgcaaaatctgccaacgttgattttactgtggacaacaatggactttatactgagcctcgccccattggcacccgttaccttacccgtcccctgtaa

SEQ ID NO: 279 - protein, 737 aa, Adeno-associated virus
RMAADGYLPDWLEDNLSEGIREWWDLKPGAPKPKANQQKQDDGRGLVLPGYKYLGPFNGLDKGEPVNAADAAALEHDKAYDQQLKAGDNPYLRYNHADAEFQERLQEDTSFGGNLGRAVFQAKKRVLEPLGLVEEGAKTAPGKKRPVEQSPQEPDSSSGIGKTGQQPAKKRLNFGQTGDSESVPDPQPLGEPPATPAAVGPTTMASGGGAPMADNNEGADGVGNASGNWHCDSTWLGDRVITTSTRTWALPTYNNHLYKQISSTSTGASNDNHYFGYSTPWGYFDFNRFHCHFSPRDWQRLINNNWGFRPKRLNFKLFNIQVEEVTTNDGVTTIANNLTSTVQVFSDSEYQLPYVLGSAHQGCLPPFPADVFMIPQYGYLTLNNGSQAVGRSSFYCLEYFPSQMLRTGNNFTFSYTFEEVPFHSSYAHSQSLDRLMNPLIDQYLYYLNRTQNQSGSAQNKDLLFSRGSPAGMSVQPKNWLPGPCYRQQRVSKTKTDNNNSNFTWTGASKYNLNGRESIINPGTAVASHKDDEDKFFPMSGVMIFGKESAGASSTALDNVMITDEEEIKATNPVATERFGTVAVNFQSSSTDPATGDVHAMGALPGMVWQDRDVYLQGPIWAKIPHTDGHFHPSPLMGGFGLKNPPPQILIKNTPVPANPPAEFSATKFASFITQYSTGQVSVEIEWELQKENSKRWNPEVQYTSNYAKSANVDFTVDNNGLYTEPRPIGTRYLTRPL

SEQ ID NO: 280 - protein, 737 aa, Adeno-associated virus
RMAADGYLPDWLEDNLSEGIREWWDLKPGAPKPKANQQKQDDGRGLVLPGYKYLGPFNGLDKGEPVNAADAAALEHDKAYDQQLKAGDNPYLRYNHADAEFQERLQEDTSFGGNLGRAVFQAKKRVLEPLGLVEEGAKTAPGKKRPVEQSPQEPDSSSGIGKTGQQPAKKRLNFGQTGDSESVPDPQPLGEPPATPAAVGPTTMASGGGAPMADNNEGADGVGNASGNWHCDSTWLGDRVITTSTRTWALPTYNNHLYKQISSTSTGASNDNHYFGYSTPWGYFDFNRFHCHFSPRDWQRLINNNWGFRPKRLNFKLFNIQVKEVTTNDGVTTIANNLTSTVQVFSDSEYQLPYVLGSAHQGCLPPFPADVFMIPQYGYLTLNNGSQAVGRSSFYCLEYFPSQMLRTGNNFTFSYTFEEVPFHSSYAHSQSLDRLMNPLIDQYLYYLNRTQNQSGSAQNKDLLFSRGSPAGMSVQPKNWLPGPCYRQQRVSKTKTDNNNSNFTWTGASKYNLNGRESIINPGTAVASHKDDEDKFFPMSGVMIFGKESAGASSTALDNVMITDEEEIKATNPVATERFGTVAVNFQSSSTDPATGDVHAMGALPGMVWQDRDVYLQGPIWAKIPHTDGHFHPSPLMGGFGLKNPPPQILIKNTPVPANPPAEFSATKFASFITQYSTGQVSVEIEWELQKENSKRWNPEVQYTSNYAKSANVDFTVDNNGLYTEPRPIGTRYLTRPL

SEQ ID NO: 281 - protein, 737 aa, Adeno-associated virus
RMAADGYLPDWLEDNLSEGIREWWDLKPGAPKPKANQQKQDDGRGLVLPGYKYLGPFNGLDKGEPVNAADAAALEHDKAYDQQLKAGDNPYLRYNHADAEFQERLQEDTSFGGNLGRAVFQAKKRVLEPLGLVEEGAKTAPGKKRPVEQSPQEPDSSSGIGKTGQQPAKKRLNFGQTGDSESVPDPQPLGEPPATPAAVGPTTMASGGGAPMADNNEGADGVGNASGNWHCDSTWLGDRVITTSTRTWALPTYNNHLYKQISSTSTGASNDNHYFGYSTPWGYFDFNRFHCHFSPRDWQRLINNNWGFRPKRLNFKLFNIQVKEVTTNDGVTTIANNLTSTVQVFSDSEYQLPYVLGSAHQGCLPPFPADVFMIPQYGYLTLNNGSQAVGRSSFYCLEYFPSQMLRTGNNFTFSYTFEEVPFHSSYAHSQSLDRLMNPLIDQYLYYLNRTQNQSGSAQNKDLLFSRGSPAGMSVQPKNWLPGPCYRQQRVSKTKTDNNNSNFTWTGASKYNLNGRESIINPGTAVASHKDDEDKFFPMSGVMIFGKESAGANSTALDNVMITDEEEIKATNPVATERFGTVAVNFQSSSTDPATGDVHAMGALPGMVWQDRDVYLQGPIWAKIPHTDGHFHPSPLMGGFGLKNPPPQILIKNTPVPANPPAEFSATKFASFITQYSTGQVSVEIEWELQKENSKRWNPEVQYTSNYAKSANVDFTVDNNGLYTEPRPIGTRYLTRPL

SEQ ID NO: 282 - DNA, 2208 bp, Adeno-associated virus
atggctgccgatggttatcttccagattggctcaaggacactctctctgaaggaataagacagtggtggaagctcaaacctggcccaccaccaccaaagcccgcagagcggcataaggacgacagcgggggtcttgtgcttcctgggtacaagtacctcggacccttcaacggactcgacaagggagagccggtcaacgaggcagacgccgcggccctcgagtacgacaaggcctacgaccggcagctcgacagcggagacaacccgtacctcaagtacaaccacgccgacgcggagtttcaggagcgccttaaagaagatacgtcttttgggggcaacctcggacgagcagtcttccaggcgaaaaagagggttcttgaacctctgggcctggttgaggaacctgttaagacggctccgggaaaaaagaggccggtagagcactctcctgtggagccagactcctcctcgggaacaggaaaagcgggccagcagcctgcgagaaagagattgaattttggtcagactggagacgcagactccgtacctgacccccagcctctcggacagccaccagcagccccctctggtctgggaactaatacgatggctacaggcagtggcgcaccaatggcagacaataacgagggcgccgacggagtgggtaattcctcgggaagttggcattgcgattccacatggatgggcgacagagtcatcaccaccagcacccgaacctgggctctgcccacctacaacaaccatctgtacaagcagatctccagccaatcaggagccagcaacgacaaccactactttggctacagcaccccttgggggtattttgacttcaacagattccactgccacttttcaccacgtgactggcaaagactcatcaacaacaactggggattccggcccaagagactcaacttcaagctctttaacattcaagtcaaggaggtcacgcagaatgacggtacgacgacgattgccaataaccttaccagcacggttcaggtgtttactgactcggagtaccagctcccgtacgtccccggctcggcgcatcaaggatgcctcccgccgttcccagcagacgtcttcatggtgccacagtatggatacctcaccctgaacaacgggagtcaggcagtaggacgctcttcattttactgcctggagtactttccttctcagatgcttcgtaccggaaacaactttaccttcagctacacctttgaggatgttcctttccacagcagctacgctcacagccagagtttggaccgtctcatgaatcctctcatcgaccagtacctgtattacttgagcagaacaaacactccaagcggaaccaccacgcagtccaggcttcagttttctcaggccggagcaagtgacattcgggaccagtctaggaactggcttcctggaccctgttaccgccagcagcgagtatcaaagacagctgcggacaacaacaacagtgaatactcgtggactggagctaccaagtaccacctcaatggcagagactctctggtgaatccgggcccggccatggccagccacaaggacgatgaagaaaagttttttcctcaaagcggggttctcatctttgggaagcaaggctcagagaaaacaaatgtggacattgaaaaggtcatgattacagacgaagaggaaatcagaaccaccaatcccgtggccacggagcagtatggttctgtatctaccaacctccagagcggcaacacacaagcagctactgcagatgtcaacacacaaggcgttcttccaggcatggtctggcaggacagagacgtgcacctgcaggggcctatctgggcaaagattccacacacggacggacattttcacccctctcccctcatgggcggatttggacttaaacaccctcctccacagattctcatcaagaacaccccggtacctgcaaatccttcgaccaccttcagtgcggcaaagtttgcttccttcatcacacagtattccacagggcaggtcagcgtggagatcgagtgggagctgcagaaggagaacagcaaacgctggaaccccgagatccagtacacttccaactacaacaaatctgttaatgtggactttactgtggacactaatggtgtgtattcagagcctcgccccattggcaccagatacctgactcgtaatctgtaa

SEQ ID NO: 283 - protein, 735 aa, Adeno-associated virus
MAADGYLPDWLKDTLSEGIRQWWKLKPGPPPPKPAERHKDDSGGLVLPGYKYLGPFNGLDKGEPVNEADAAALEYDKAYDRQLDSGDNPYLKYNHADAEFQERLKEDTSFGGNLGRAVFQAKKRVLEPLGLVEEPVKTAPGKKRPVEHSPVEPDSSSGTGKAGQQPARKRLNFGQTGDADSVPDPQPLGQPPAAPSGLGTNTMATGSGAPMADNNEGADGVGNSSGSWHCDSTWMGDRVITTSTRTWALPTYNNHLYKQISSQSGASNDNHYFGYSTPWGYFDFNRFHCHFSPRDWQRLINNNWGFRPKRLNFKLFNIQVKEVTQNDGTTTIANNLTSTVQVFTDSEYQLPYVPGSAHQGCLPPFPADVFMVPQYGYLTLNNGSQAVGRSSFYCLEYFPSQMLRTGNNFTFSYTFEDVPFHSSYAHSQSLDRLMNPLIDQYLYYLSRTNTPSGTTTQSRLQFSQAGASDIRDQSRNWLPGPCYRQQRVSKTAADNNNSEYSWTGATKYHLNGRDSLVNPGPAMASHKDDEEKFFPQSGVLIFGKQGSEKTNVDIEKVMITDEEEIRTTNPVATEQYGSVSTNLQSGNTQAATADVNTQGVLPGMVWQDRDVHLQGPIWAKIPHTDGHFHPSPLMGGFGLKHPPPQILIKNTPVPANPSTTFSAAKFASFITQYSTGQVSVEIEWELQKENSKRWNPEIQYTSNYNKSVNVDFTVDTNGVYSEPRPIGTRYLTRNL

SEQ ID NO: 284 - DNA, 2208 bp, Adeno-associated virus
atggctgccgatggttatcttccagattggctcgaggacactctctctgaaggaataagacagtggtggaagctcaaacctggcccaccaccaccaaagcccgcagagcggcataaggacgacagcaggggtcttgtgcttcctgggtacaagtacctcggacccttcaacggactcgacaagggggagccggtcaacgaggcagacgccgcggccctcgagcacgacaaggcctacgaccggcagctcgacagcggagacaacccgtacctcaagtacaaccacgccgacgcagagtttcaggagcgccttaaagaagatacgtcttttgggggcaacctcggacgagcagtcttccaggcgaaaaagagggttcttgaacctctgggcctggttgaggaacctgttaagacggctccgggaaaaaagaggccggtagagcactctcctgtggagccagactcctcctcgggaaccggaaaagcgggccagcagcctgcaagaaaaagattaaattttggtcagactggagacgcagactccgtacctgacccccagcctctcggacagccaccagcagccccctctggtctgggatctactacaatggctacaggcagtggcgcaccaatggcagacaataacgagggtgccgatggagtgggtaattcctcaggaaattggcattgcgattcccaatggctgggcgacagagtcatcaccaccagcacccgaacctgggccctgcccacatacaacaaccacctctacaagcaaatctccagccaatcaggagccagcaacgacaaccactactttggctacagcaccccctgggggtattttgacttcaacagattccactgccacttttcaccacgtgactggcaaagactcatcaacaacaactggggattccggcccaaaagactcaacttcaagctctttaatattcaagtcaaagaggtcacgcagaatgacggtacgacgacgattgccaataaccttaccagcacggttcaggtgtttactgactcggagtaccagctcccgtacgtcctgggctcggcgcatcaaggatgcctcccgccgtttccagcggacgtcttcatggtcccacagtatggatacctcaccctgaacaacgggagtcaggcggtaggacgctcttccttttactgcctggagtactttccttctcagatgctgcgtactggaaacaactttcagttcagctacacttttgaagacgtgcctttccacagcagctacgctcacagccagagtctggatcggctgatgaatcctctgatcgaccagtacctgtattatctgaacaagacacaaacaaatagtggaactcttcagcagtctcggctactgtttagccaagctggaccaaccaacatgtctcttcaagctaaaaactggctgcctggaccttgctacagacagcagcgtctgtcaaaacaggcaaacgacaacaacaacagcaactttccctggactgcagctacaaagtatcatctaaatggccgggactcgttggttaatccaggaccagctatggccagtcgcaaggatgacgaagaaaagtttttccccatgcatggaaccctgatatttggtaaacaaggaacaaatgccaacgacgcggatttggaaaatgtcatgattacagatgaagaagaaatcagggccaccaatcccgtggctacggagcagtacgggactgtgtcaaataatttgcaaaactcaaacactggtccaactactggaactgtcaatcaccaaggagcgttacctggtatggtgtggcaggatcgagacgtgtacctgcagggacccatttgggccaagattcctcacaccgatggacactttcatccttctccactgatgggaggttttggactcaaacacccgcctcctcagatcatgatcaaaaacactcccgttccagccaatcctcccacaaacttcagttctgccaagtttgcttctttcatcacacagtattccacgggacaggtcagcgtggagatcgagtgggagctgcagaaggagaacagcaaacgctggaatcccgaaattcagtacacttccaactacaacaagtctgttaatgtggactttactgtggacactaatggtgtgtattcagagcctcgccccattggcaccagatacctgactcgtaatctgtaa

SEQ ID NO: 285 - protein, 735 aa, Adeno-associated virus
MAADGYLPDWLEDTLSEGIRQWWKLKPGPPPPKPAERHKDDSRGLVLPGYKYLGPFNGLDKGEPVNEADAAALEHDKAYDRQLDSGDNPYLKYNHADAEFQERLKEDTSFGGNLGRAVFQAKKRVLEPLGLVEEPVKTAPGKKRPVEHSPVEPDSSSGTGKAGQQPARKRLNFGQTGDADSVPDPQPLGQPPAAPSGLGSTTMATGSGAPMADNNEGADGVGNSSGNWHCDSQWLGDRVITTSTRTWALPTYNNHLYKQISSQSGASNDNHYFGYSTPWGYFDFNRFHCHFSPRDWQRLINNNWGFRPKRLNFKLFNIQVKEVTQNDGTTTIANNLTSTVQVFTDSEYQLPYVLGSAHQGCLPPFPADVFMVPQYGYLTLNNGSQAVGRSSFYCLEYFPSQMLRTGNNFQFSYTFEDVPFHSSYAHSQSLDRLMNPLIDQYLYYLNKTQTNSGTLQQSRLLFSQAGPTNMSLQAKNWLPGPCYRQQRLSKQANDNNNSNFPWTAATKYHLNGRDSLVNPGPAMASRKDDEEKFFPMHGTLIFGKQGTNANDADLENVMITDEEEIRATNPVATEQYGTVSNNLQNSNTGPTTGTVNHQGALPGMVWQDRDVYLQGPIWAKIPHTDGHFHPSPLMGGFGLKHPPPQIMIKNTPVPANPPTNFSSAKFASFITQYSTGQVSVEIEWELQKENSKRWNPEIQYTSNYNKSVNVDFTVDTNGVYSEPRPIGTRYLTRNL

SEQ ID NO: 286 - DNA, 2208 bp, Adeno-associated virus
atggctgccgatggttatcttccagattggctcgaggacactctctctgaaggaataagacagtggtggaagctcaaacctggcccaccaccaccaaagcccgcagagcggcataaggacgacagcaggggtcttgtgcttcctgggtacaagtacctcggacccttcaacggactcgacaagggagagccggtcaacgaggcagacgccgcggccctcgagcacgacaaagcctacgaccggcagctcgacagcggagacaacccgtacctcaagtacaaccacgccgacgcggagtttcaggagcgccttaaagaagatacgtcttttgggggcaacctcggacgagcagtcttccaggcgaaaaagagggttcttgaacctctgggcctggttggggaacctgtcaagacggctccaggaaaaaagaggccggtagagcactctcctgtggagccagactcctcctcgggaaccggaaaggcgggccagcagcctgcaagaaaaagattgaattttggtcagactggagacgcagactcagtacctgacccccagcctctcggacagccaccagcagccccctctggtctgggaactaatacgatggctacaggcagtggcgcaccaatggcagacaataacgagggcgccgacggagtgggtaattcctcgggaaattggcattgcgattccacatggatgggcgacagagtcatcaccaccagcacccgaacctgggccctgcccacctacaacaaccacctctacaaacaaatttccagccaatcaggagcctcgaacgacaatcactactttggctacagcaccccttgggggtattttgacttcaacagattccactgccacttttcaccacgtgactggcaaagactcatcaacaacaactggggattccgacccaagagactcaacttcaagctctttaacattcaagtcaaagaggtcacgcagaatgacggtacgacgacgattgccaataaccttaccagcacggttcaggtgtttactgactcggagtaccagctcccgtacgtcctcggctcggcgcatcaaggatgcctcccgccgttcccagcagacgtcttcatggtgccacagtatggatacctcaccctgaacaacgggagtcaggcagtaggacgctcttcattttactgcctggagtactttccttctcagatgctgcgtaccggaaacaactttaccttcagctacacttttgaggacgttcctttccacagcggctacgctcacagccagagtctggaccgtctcatgaatcctctcatcgaccagtacctgtattacttgagcacaacaaacactccaagtggaaccaccacgcagtcaaggcttcagttttctcaggccggagcgagtgacattcgggaccagtctaggaactggcttcctggaccctgttaccgccagcagcgagtatcaaagacatctgcggataacaacaacagtgaatactcgtggactggagctaccaagtaccacctcaatggcagagactctctggtgaatccgggcccggccatggcaagccacaaggacaatgaagaaaagttttttcctcagagcggggttctcatctttgggaagcaaggctcagagaaaacaaatgtggacattgaaaaggtcatgattacagacgaagaggaaatcaggacaaccaatcccgtggctacggagcagtacggttctgtatctaccaacctccagagaggcaacagacaagcagctaccgcagatgtcaacacacaaggcgttcttccaggcatggtctggcaggacagagatgtgtaccttcaggggcccatctgggcaaagattccacacacggacggacattttcacccctctcccctcatgggtggattcggacttaaacaccctcctccacagattctcatcaagaacaccccggtacctgcgaatccttcgaccaccttcagtgcggcaaagtttgcttccttcatcacacagtactccacgggacaggtcagcgtggagatcgagtgggagctgcagaaggaaaacagcaaacgctggaatcccgaaattcagtacacttccaactacaacaagtctgttaatgtggactttactgtggacactaatggcgtgtattcagagcctcgccccattggcaccagatacctgactcgtaatctgtaa

SEQ ID NO: 287 - protein, 735 aa, Adeno-associated virus
MAADGYLPDWLEDTLSEGIRQWWKLKPGPPPPKPAERHKDDSRGLVLPGYKYLGPFNGLDKGEPVNEADAAALEHDKAYDRQLDSGDNPYLKYNHADAEFQERLKEDTSFGGNLGRAVFQAKKRVLEPLGLVGEPVKTAPGKKRPVEHSPVEPDSSSGTGKAGQQPARKRLNFGQTGDADSVPDPQPLGQPPAAPSGLGTNTMATGSGAPMADNNEGADGVGNSSGNWHCDSTWMGDRVITTSTRTWALPTYNNHLYKQISSQSGASNDNHYFGYSTPWGYFDFNRFHCHFSPRDWQRLINNNWGFRPKRLNFKLFNIQVKEVTQNDGTTTIANNLTSTVQVFTDSEYQLPYVLGSAHQGCLPPFPADVFMVPQYGYLTLNNGSQAVGRSSFYCLEYFPSQMLRTGNNFTFSYTFEDVPFHSGYAHSQSLDRLMNPLIDQYLYYLSTTNTPSGTTTQSRLQFSQAGASDIRDQSRNWLPGPCYRQQRVSKTSADNNNSEYSWTGATKYHLNGRDSLVNPGPAMASHKDNEEKFFPQSGVLIFGKQGSEKTNVDIEKVMITDEEEIRTTNPVATEQYGSVSTNLQRGNRQAATADVNTQGVLPGMVWQDRDVYLQGPIWAKIPHTDGHFHPSPLMGGFGLKHPPPQILIKNTPVPANPSTTFSAAKFASFITQYSTGQVSVEIEWELQKENSKRWNPEIQYTSNYNKSVNVDFTVDTNGVYSEPRPIGTRYLTRNL

SEQ ID NO: 288 - DNA, 2208 bp, Adeno-associated virus
atggctgccgatggttatcttccagattggctcgaggacactctctctgaaggaataagacagtggtggaagctcaaacctggcccaccaccaccaaagcccgcagagcggcataaggacgacagcaggggtcttgtgcttcctgggtacaagtacctcggacccttcaacggactcgacaagggagagccggtcaacgaggcagacgccgcggccctcgagcacgacaaagcctacgaccggcagctcgacagcggagacaacccgtacctcaagtacaaccacgccgacgcggagtttcaggagcgccttaaagaagatacgtcttttgggggcaacctcggacgagcagtcttccaggcgaaaaagagggttcttgaacctctgggcctggttggggaacctgttaagacggctccgggaaaaaagaggccggtagagcactctcctgtggagccagactcctcctcgggaaccggaaaggcgggccagcagcctgcaagaaaaagattgaattttggtcagactggagacgcagactcagtacctgacccccagcctctcggacagccaccagcagccccctctggtctgggaactaatacgatggctacaggcagtggcgcaccaatggcagacaataacgagggcgccgacggagtgggtaattcctcgggaaatcggcattgcgattccacatggatgggcgacagagtcatcaccaccagcacccgaacctgggccctgcccacctacaacaaccacctctacagacaaatttccagccaatcaggagcctcgaacgacaatcactactttggctacagcaccccttgggggtattttgacttcaacagattccactgccacttttcaccacgtgactggcaaagactcatcaacaacaactggggattccgacccaagagactcaacttcaagctctttaacattcaagtcaaagaggtcacgcagaatgacggtacgacgacgattgccaataaccttaccagcacggttcaggtgtttactgactcggagtaccagctcccgtacgtcctcggctcggcgcatcaaggatgcctcccgccgttcccagcagacgtcttcatggtgccacagtatggatacctcaccctgagcaacgggagtcaggcagtaggacgctcttcattttactgcccggagtactttccttctcagatgctgcgtaccggaaacaactttaccttcagctacacttttgaggacgttcctttccacagcagctacgctcacagccagagtctggaccgtctcatgaatcctctcatcgaccagtacctgtattacttgagcacaacaaacactccaagtggaaccaccacgcagtcaaggcttcagttttctcaggccggagcgagtgacattcgggaccagtctaggaactggcttcctggaccctgttaccgccagcagcgagtatcaaagacatctgcggataacaacaacagtgaatactcgtggactggagctaccaagtaccacctcaatggcagagactctctggtgaatccgggcccggccatggcaagccacaaggacaatgaagaaaagttttttcctcagagcggggttctcatctttgggaagcaaggctcagagaaaacaaatgtggacattgaaaaggtcatgattacagacgaagaggaaatcaggacaaccaatcccgtggctacggagcagtatggttctgtatctaccaacctccagagaggcaacagacaagcagctaccgcagatgtcaacacacaaggcgttcttccaggcatggtctggcaggacagagatgtgtaccttcaggggcccatctgggcaaagattccacacacggacggacattttcacccctctcccctcatgggtggattcggacctaaacaccctcctccacagattctcatcaagaacaccccggtacctgcgaatccttcgaccaccttcagtgcggcaaagtttgcttccttcatcacacagtactccacgggacaggtcagcgtggagatcgagtgggagctgcagaaggaaaacagcaaacgctggaatcccgaaattcagtacacttccaactacaacaagtctgttaatgtggactttactgtggacactaatggcgtgtattcagagcctcgccccattggcaccagatacctgactcgtaatttgtaa

SEQ ID NO: 289 - protein, 735 aa, Adeno-associated virus
MAADGYLPDWLEDTLSEGIRQWWKLKPGPPPPKPAERHKDDSRGLVLPGYKYLGPFNGLDKGEPVNEADAAALEHDKAYDRQLDSGDNPYLKYNHADAEFQERLKEDTSFGGNLGRAVFQAKKRVLEPLGLVGEPVKTAPGKKRPVEHSPVEPDSSSGTGKAGQQPARKRLNFGQTGDADSVPDPQPLGQPPAAPSGLGTNTMATGSGAPMADNNEGADGVGNSSGNRHCDSTWMGDRVITTSTRTWALPTYNNHLYRQISSQSGASNDNHYFGYSTPWGYFDFNRFHCHFSPRDWQRLINNNWGFRPKRLNFKLFNIQVKEVTQNDGTTTIANNLTSTVQVFTDSEYQLPYVLGSAHQGCLPPFPADVFMVPQYGYLTLSNGSQAVGRSSFYCPEYFPSQMLRTGNNFTFSYTFEDVPFHSSYAHSQSLDRLMNPLIDQYLYYLSTTNTPSGTTTQSRLQFSQAGASDIRDQSRNWLPGPCYRQQRVSKTSADNNNSEYSWTGATKYHLNGRDSLVNPGPAMASHKDNEEKFFPQSGVLIFGKQGSEKTNVDIEKVMITDEEEIRTTNPVATEQYGSVSTNLQRGNRQAATADVNTQGVLPGMVWQDRDVYLQGPIWAKIPHTDGHFHPSPLMGGFGPKHPPPQILIKNTPVPANPSTTFSAAKFASFITQYSTGQVSVEIEWELQKENSKRWNPEIQYTSNYNKSVNVDFTVDTNGVYSEPRPIGTRYLTRNL

SEQ ID NO: 290 - DNA, 2205 bp, Adeno-associated virus
atggctgccgatggttatcttccagattggctcgaggacactctctctgaaggaataagacagtggtggaagctcaaacctggcccaccaccaccaaagcccgcagagcggcataaggacgacagcaggggtcttgtgcttcctgggtacaagtacctcggacccttcaacggactcgacaagggagagccggtcaacgaggcagacgccgcggccctcgagcacgacaaggcctacgaccggcagctcgacagcggagacaacccgtacctcaagtacaaccacgccgacgcggagtttcaggagcgtcttaaagaagatacgtcttttgggggcaacctcggacgagcagtcttccaggcgaaaaagagggttcttgaacctctgggcctggttgaggaacctgttaagacggctccgggaaaaaagaggccggtagagcactctcctgcggagccagactcctcctcgggaaccggaaaagcgggccagcagcctgcaagaaaaagactgaatttcggtcagactggagacgcagactccgtacctgacccccagcctctcagacagccaccagcagcccccacaagtttgggatctactacaatggctacaggcagtggcgcaccaatggcagacaataacgagggtgccgatggagtgggtaattcctcaggaaattggcattgcgattcccaatggctgggcgacagagtcatcaccaccagcacccgaacctgggccctgcccacctacaacaaccacctttacaagcaaatctccagccaatcaggagcctcaaacgacaaccactactttggctacagcaccccctgggggtattttgacttcaacagattccactgccacttttcaccacgtgactggcaaagactcatcaacaacaactggggattccgacccaagagactcaacttcaagctctttaacattcaagtcaaagaggtcacgcagaatgacggtacgacgacgattgccaataaccttaccagcacggttcaggtgtttactgactcggagtaccagctcccgtacgtcctcggctcggcgcatcaaggatgcctcccgccgtttccagcggacgtcttcatggtcccacagtatggatacctcaccctgaacaacgggagtcaggcggtaggacgctcttccttttactgcctggagtactttccttctcagatgctgcgtactggaaacaactttcagttcagctacacttttgaagacgtgcctttccacagcagctacgctcacagccagagtttggatcggctgatgaatcctctgatcgaccagtacctgtattatctaaacagaacacaaacagctagtggaactcagcagtctcggctactgtttagccaagctggacccacaagcatgtctcttcaagctaaaaactggctgcctggaccgtgttatcgccagcagcgtttgtcaaagcaggcaaacgacaacaacaacagcaactttccctggactggagctaccaagtactacctcaatggcagagactctttggtgaacccgggcccggccatggccagccacaaggacgatgaagaaaagtttttccccatgcatggaaccctaatatttggtaaagaaggaacaaatgctaccaacgcggaattggaaaatgtcatgattacagatgaagaggaaatcaggaccaccaatcccgtggctacagagcagtacggatatgtgtcaaataatttgcaaaactcaaatactgctgcaagtactgaaactgtgaatcaccaaggagcattacctggtatggtgtggcaggatcgagacgtgtacctgcagggacccatttgggccaagattcctcacaccgatggacactttcatccttctccactgatgggaggttttggactcaaacacccgcctcctcagattatgatcaaaaacactcccgttccagccaatcctcccacaaacttcagttctgccaagtttgcttccttcatcacacagtattccacgggacaggtcagcgtggagatcgagtgggagctgcagaaggagaacagcaaacgctggaatcccgaaattcagtacacttccaactacaacaaatctgttaatgtggactttactgtggacactaatggtgtgtattcagagcctcgccccattggcaccagatacctgactcgtaatctgtaa

SEQ ID NO: 291 - protein, 734 aa, Adeno-associated virus
MAADGYLPDWLEDTLSEGIRQWWKLKPGPPPPKPAERHKDDSRGLVLPGYKYLGPFNGLDKGEPVNEADAAALEHDKAYDRQLDSGDNPYLKYNHADAEFQERLKEDTSFGGNLGRAVFQAKKRVLEPLGLVEEPVKTAPGKKRPVEHSPAEPDSSSGTGKAGQQPARKRLNFGQTGDADSVPDPQPLRQPPAAPTSLGSTTMATGSGAPMADNNEGADGVGNSSGNWHCDSQWLGDRVITTSTRTWALPTYNNHLYKQISSQSGASNDNHYFGYSTPWGYFDFNRFHCHFSPRDWQRLINNNWGFRPKRLNFKLFNIQVKEVTQNDGTTTIANNLTSTVQVFTDSEYQLPYVLGSAHQGCLPPFPADVFMVPQYGYLTLNNGSQAVGRSSFYCLEYFPSQMLRTGNNFQFSYTFEDVPFHSSYAHSQSLDRLMNPLIDQYLYYLNRTQTASGTQQSRLLFSQAGPTSMSLQAKNWLPGPCYRQQRLSKQANDNNNSNFPWTGATKYYLNGRDSLVNPGPAMASHKDDEEKFFPMHGTLIFGKEGTNATNAELENVMITDEEEIRTTNPVATEQYGYVSNNLQNSNTAASTETVNHQGALPGMVWQDRDVYLQGPIWAKIPHTDGHFHPSPLMGGFGLKHPPPQIMIKNTPVPANPPTNFSSAKFASFITQYSTGQVSVEIEWELQKENSKRWNPEIQYTSNYNKSVNVDFTVDTNGVYSEPRPIGTRYLTRNL

SEQ ID NO: 292 - DNA, 3160 bp, Adeno-associated virus
acccttcactaaagggactagtcctgcaggtttaaacgaattcgcccttgctgcgtcaactggaccaatgagaactttcccttcaacgactgtgtcgacaagatggtgatttggtgggaggaggggaagatgaccgccaaggtcgtggagtcggccaaagccattctcggaggaagcaaggtgcgcgtggaccagaaatgcaagtcctcggcccagatagatccgactcccgtgatcgtcacctccaacaccaacatgtgcgccgtgattgacgggaactcaacgaccttcgaacaccagcagccgttgcaagaccggatgttcaaatttgaactcacccgccgtctggatcatgactttgggaaggtcaccaagcgggaagtcaaagactttttccggtgggcaaaggatcacgtggttgaggtggagcatgaattctacgtcaaaaagggtggagccaagaaaagacccgcccctagtgacgcagatataagtgagcccaaacgggtgcgcgagtcagttgcgcagccatcgacgtcagacgcggaagcttcgatcaactacgcggacaggtaccaaaacaaatgttctcgtcacgtgggcatgaatctgatgctgtttccctgcagacaatgcgagagaatgaatcaaaattcaaatatctgcttcactcacggacagaaagactgtttagagtgctttcccgtgtcagaatctcaacctgtttctgtcgtcaaaaaggcgtatcagaaactgtgctacattcatcatatcatgggaaaggtgccagacgcttgcactgcctgcgatctggtcaatgtggatttggatgactgcatctctgaacaataaatgatttaaatcaggtatggctgccgatggttatcttccagattggctcgaggacactctctctgaaggaataagacagtggtggaagctcaaacctggcccaccaccaccaaagcccgcagagcggcataaggacgacagcaggggtcttgtgcttcctgggtacaagtacctcggacccttcaacggactcgacaagggagagccggtcaacgaggcagacgccgcggccctcgagcacgacaaggcctacgaccggcagctcgacagcggagacaacccgtacctcaagtacaaccacgccgacgcggagtttcaggagcgtcttaaagaagatacgtcttttgggggcaacctcggacgagcagtcttccaggcgaaaaagagggttcttgaacctctgggcctggttgaggaacctgttaagacggctccgggaaaaaagaggccggtagagcactctcctgcggagccagactcctcctcgggaaccggaaaagcgggccagcagcctgcaagaaaaagactgaatttcggtcagactggagacgcagactccgtacctgacccccagcctctcagacagccaccagcagcccccacaagtttgggatctactacaatggctacaggcagtggcgcaccaatggcagacaataacgagggtgccgatggagtgggtaattcctcaggaaattggcattgcgattcccaatggctgggcgacagagtcatcaccaccagcacccgaacctgggccctgcccacctacaacaaccacctttacaagcaaatctccagccaatcaggagcctcaaacgacaaccactactttggctacagcaccccctgggggtattttgacttcaacagattccactgccacttttcaccacgtgactggcaaagactcatcaacaacaactggggattccgacccaagagactcaacttcaagctctttaacattcaagtcaaagaggtcacgcagaatgacggtacgacgacgattgccaataaccttaccagcacggttcaggtgtttactgactcggagtaccagctcccgtacgtcctcggctcggcgcatcaaggatgcctcccgccgtttccagcggacgtcttcatggtcccacagtatggatacctcaccctgaacaacgggagtcaggcggtaggacgctcttccttttactgcctggagtactttccttctcagatgctgcgtactggaaacaactttcagttcagctacacttttgaagacgtgcctttccacagcagctacgctcacagccagagtttggatcggctgatgaatcctctgatcgaccagtacctgtattatctaaacagaacacaaacagctagtggaactcagcagtctcggctactgtttagccaagctggacccacaagcatgtctcttcaagctaaaaactggctgcctggaccgtgttatcgccagcagcgtttgtcaaagcaggcaaacgacaacaacaacagcaactttccctggactggagctaccaagtactacctcaatggcagagactctttggtgaacccgggcccggccatggccagccacaaggacgatgaagaaaagtttttccccatgcatggaaccctaatatttggtaaagaaggaacaaatgctaccaacgcggaattggaaaatgtcatgattacagatgaagaggaaatcaggaccaccaatcccgtggctacagagcagtacggatatgtgtcaaataatttgcaaaactcaaatactgctgcaagtactgaaactgtgaatcaccaaggagcattacctggtatggtgtggcaggatcgagacgtgtacctgcagggacccatttgggccaagattcctcacaccgatggacactttcatccttctccactgatgggaggttttggactcaaacacccgcctcctcagattatgatcaaaaacactcccgttccagccaatcctcccacaaacttcagttctgccaagtttgcttccttcatcacacagtattccacgggacaggtcagcgtggagatcgagtgggagctgcagaaggagaacagcaaacgctggaatcccgaaattcagtacacttccaactacaacaaatctgttaatgtggactttactgtggacactaatggtgtgtattcagagcctcgccccattggcaccagatacctgactcgtaatctgtaattgcttgttaatcaataaaccgtttaattcgtttcagttgaactttggtctctgcgaagggcgaattcgcggccgctaaatcaatcg

SEQ ID NO: 293 - protein, 734 aa, Adeno-associated virus
MAADGYLPDWLEDTLSEGIRQWWKLKPGPPPPKPAERHKDDSRGLVLPGYKYLGPFNGLDKGEPVNEADAAALEHDKAYDRQLDSGDNPYLKYNHADAEFQERLKEDTSFGGNLGRAVFQAKKRVLEPLGLVEEPVKTAPGKKRPVEHSPAEPDSSSGTGKAGQQPARKRLNFGQTGDADSVPDPQPLGQPPAAPTSLGSTTMATGSGAPMADNNEGADGVGNSSGNWHCDSQWLGDRVITTSTRTWALPTYNNHLYKQISSQSGASNDNHYFGYSTPWGYFDFNRFHCRFSPRDWQRLINNNWGFRPKRLNFKLFNIQVKEVTQNDGTTTIANNLTSTVQVFTDSEYQLPYVLGSAHQGCLPPFPADVFMVPQYGYLTLNNGSQAVGRSSFYCLEYFPSQMLRTGNNFQFSYTFEDVPFHSSYAHSQGLDRLMNPLIDQYLYYLNRTQTASGTQQSRLLFSQAGPTSMSLQAKNWLPGPCYRQQRLSKQANDNNNSNFPWTGATKYHLNGGDSLVNPGPAMASHKDDEEKFFPMHGTLIFGKEGTNATNAELENVMITDEEEIRTTNPVATEQYGYVSNNLQNSNTAASTETVNHQGALPGMVWQDRDVYLRGPIWAKIPHADGHFHPSPLMGGFGLKHPPPQIMIKNTPVPANPPTNFSSAKFASFITQYSTGQVSVEIEWELQKENSKRWNPEIQYTSNYNKSVNVDFTVDTNGVYSEPRPIGTRYLTRNL

SEQ ID NO: 294 - DNA, 3157 bp, Adeno-associated virus
ctcactaagggactagtcctgcaggtttaaacgaattcgcccttgctgcgtcaactggaccaatgagaactttcccttcaacgactgtgtcgacaagatggtgatttggtgggaggaggggaagatgaccgccaaggtcgtggagtcggccaaagccactctcggaggaagcaaggtgcgcgtggaccagaaacgcaagtcctcggcccagatagatccgactcccgtgatcgtcacctccaacaccaacatgtgcgccgtgattgacgggaactcaacgaccttcgaacaccagcagccgttgcaagaccgaatgttcaaatttgaactcacccgccgtctggatcatgacttcgggaaggtcaccaagcaggaagtcaaagactttttccggtgggcaaaggatcacgtggttgaggtggagcatgaattctacgtcaaaaagggtggagccaagaaaagacccgcccctagtgacgcagatataagtgagcccaaacgggtgcgcgagtcagttgcgcagccatcgacgtcagacgcggaagcttcgatcaactacgcggacaggtaccaaaacaaatgttctcgtcacgtgggcatgaatctgatgctgtttccctgcagacaatgcgagagaatgaatcaaaattcaaatatctgcttcactcacggacagaaagactgtttagagtgctttcccgtgtcagaatctcaacctgtttctgtcgtcaaaaaggcgtatcagaaactgtgctacattcatcatatcatgggaaaggtgccagacgcttgcactgcctgcgatctggtcaatgtggatttggatgactgcatctctgaacaataaatgatttaaatcaggtatggctgccgatggttatcttccagattggctcgaggacactctctctgaaggaataagacagtggtggaagctcaaacctggcccaccaccaccaaagcccgcagagcggcataaggacgacagcaggggtcttgtgcttcctgggtacaagtacctcggacccttcaacggactcgacaagggagagccggtcaacgaggcagacgccgcggctctcgagcacgacaaggcctacgaccggcagctcgacagcggagacaacccgtacctcaagtacaaccacgccgacgcggagtttcaggagcgtcttaaagaagatacgtcttttgggggcaacctcggacgagcagtcttccaggcgaaaaagagggttcttgaacctctgggcctggttgaggaacctgttaagacggctccgggaaaaaagaggccggtagagcactctcctgcggagccagactcctcctcgggaaccggaaaagcgggccagcagcctgcaagaaaaagactgaatttcggtcagactggagacgcagactccgtacctgacccccagcctctcggacagccaccagcagcccccacaagtttgggatctactacaatggctacaggcagtggcgcaccaatggcagacaataacgagggtgccgatggagtgggtaattcctcaggaaattggcattgcgattcccaatggctgggcgacagagtcatcaccaccagcacccgaacctgggccctgcccacctacaacaaccacctttacaagcaaatctccagccaatcaggagcctcaaacgacaaccactactttggctacagcaccccctgggggtattttgacttcaacagattccactgccgcttttcaccacgtgactggcaaagactcatcaacaacaactggggattccgacccaagagactcaacttcaagctctttaacattcaagtcaaagaggtcacgcagaatgacggtacgacgacgattgccaataaccttaccagcacggttcaggtgtttactgactcggagtaccagctcccgtacgtcctcggctcggcgcatcaaggatgcctcccgccgtttccagcggacgtcttcatggtcccacagtatggatacctcaccctgaacaacgggagtcaggcggtaggacgctcttccttttactgcctggagtactttccttctcagatgctgcgtactggaaacaactttcagttcagctacacttttgaagacgtgcctttccacagcagctacgctcacagccagggtttggatcggctgatgaatcctctgatcgaccagtacctgtattatctaaacagaacacaaacagctagtggaactcagcagtctcggctactgtttagccaagctggacccacaagcatgtctcttcaagctaaaaactggctgcctggaccgtgttatcgccagcagcgtttgtcaaagcaggcaaacgacaacaacaacagcaactttccctggactggagctaccaagtaccacctcaatggcggagactctttggtgaacccgggcccggccatggccagccacaaggacgatgaagaaaagtttttccccatgcatggaaccctaatatttggtaaagaaggaacaaatgctaccaacgcggaattggaaaatgtcatgattacagatgaagaggaaatcaggaccaccaatcccgtggctacagagcagtacggatatgtgtcaaataatttgcaaaactcaaatactgctgcaagtactgaaactgtgaatcaccaaggagcattacctggtatggtgtggcaggatcgagacgtgtacctgcggggacccatttgggccaagattcctcacgccgatggacactttcatccttctccactgatgggaggttttggactcaaacacccgcctcctcagattatgatcaaaaacactcccgttccagccaatcctcccacaaacttcagttctgccaagtttgcttccttcatcacacagtattccacgggacaggtcagcgtggagatcgagtgggagctgcagaaggagaacagcaaacgctggaatcccgaaattcagtacacttccaactacaacaaatctgttaatgtggactttactgtggacactaatggtgtgtattcagagcctcgccccattggcaccagatacctgactcgtaatctgtaattgcttgttaatcaataaaccgtttaattcgtttcagttgaactttggtctctgcgaagggcgaattcgcggccgctaaattcaattcg

SEQ ID NO: 295 - protein, 734 aa, Adeno-associated virus
MAADGYLPDWLEDTLSEGIRQWWKLKPGPPPPKPAERHKDDSRGLVLPGYKYLGPFNGLDKGEPVNEADAAALEHDKAYDRQLDSGDNPYLKYNHADAEFQERLKEDTSFGGNLGRAVFQAKKRVLEPLGLVEEPVKTAPGKKRPVEHSPAEPDSSSGTGKAGQQPARKRLNFGQTGDADSVPDPQPLGQPPAAPTSLGSTTMATGSGAPMADNNEGADGVGNSSGNWHCDSQWLGDRVITTSTRTWALPTYNNHLYKQISSQSGASNDNHYFGYSTPWGYFDFNRFHCHFSPRDWQRLINNNWGFRPKRLNFKLFNIQVKEVTQNDGTTTIANNLTSTVQVFTDSEYQLPYVLGSAHQGCLPPFPADVFMVPQYGYLTLNNGSQAVGRSSFYCLECFPSQMLRTGNNFQFSYTFEDVPFHSSYAHSQSLDRLMNPLIDQYLYYLNRTQTASGTQQSRLLFSQAGPTSMSLQAKNWLPGPCYRQQRLSKQANDNNNSNFPWTGATKYHLNGRDSLVNPGPAMASHKDDEEKFFPMHGTLIFGKEGTNATNAELENVMITDEEEIRTTNPVATEQYGYVSNNLQNSNTAASTETVNHQGALPGMVWQDRDVYLQGPIWAKIPHTDGHFHPSPLMGGFGLKHPPPQIMIKNTPVPANPPTNFSSAKFASFITQYSTGQVSVEIEWELQKENSKRWNPEIQYTSNYNKSVNVDFTVDTNGVYSEPRPIGTRYLTRNL

SEQ ID NO: 296 - DNA, 2208 bp, Adeno-associated virus
atggctgccgatggttatcttccagattggctcgaggacactctctctgaaggaataagacagtggtggaagctcaaacctggcccaccaccaccaaagcccgcagagcggcataaggacgacagcaggggtcttgtgcttcctggatacaagtacctcggacccttcaacggactcgacaagggagagccggtcaacgaggcagacgccgcggccctcgagcacgacaaggcctacgaccggcagctcgacagcggagacaacccgtacctcaagtacaaccacgccgacgcggagtttcaggagcgccttaaagaagatacgtcttttgggggcaacctcggacgagcagtcttccaggcgaaaaagagggttcttgaacctctgggcctggttgaggaacctgttaagacggctccgggaaaaaagaggccggtagagcactctcctgtggagccagactcctcctcgggaaccggaaaagcgggcaaccagcctgcaagaaaaagattgaatttcggtcagactggagacgcagactccgtacctgacccccagcctctcggacagccaccagcatccccctctggtctgggaactaatacgatggctacaggcagtggcgcaccaatggcagacaataacgagggcgccgacggagtgggtaattcctcgggaaattggcattgcgattccacatggatgggcgacagagtcgtcaccaccagcacccgcacctgggccctgcccacctacaacaaccacctctacaagcagatttccagccaatcaggagccagcaacgacaaccactactttggctacagcaccccttgggggtattttgacttcaacagattccactgccacttttcgccacgcgactggcagagactcatcaacaacaactggggattccggcccaaaagactcaacttcaagctgtttaacattcaagtcaaggaggtcacgcagaatgacggtacgacgacgattgccaataaccttaccagcacggttcaggtgtttactgacttggagtaccagctcccgtacgtcctcggctcggcgcatcaaggatgcctcccgccgttcccagcagacgtcttcatggtgccacagtatggatacctcaccctgaacaacgggagtcaggcggtaggacgctcttccttttactgcctggagtactttccttctcagatgcttcgcaccggaaacaactttaccttcagctacacttttgaagacgttcctttccacagcagctacgctcacagtcaaagtctggaccgtctcatgaatcctctcatcgaccagtacctgtattacttgagcagaacaaacactccaagcggaaccactacgcagtccaggcttcagttttctcaggccggagcgagtgacattcgggaccagtctaggaactggcttcctggaccctgttaccgccagcagcgagtatcaaagacagctgcggataacaacaacagtgaatactcgtggactggagctaccaagtaccacctcaatggcagagactctctggtgaatccgggcccggccatggccagccacaaggacgatgaagaaaagttttttcctcaaagcggggttctcatctttgggaagcaaggctcagagaaaacaaatgtggacattgaaaaggtcatgattacagacgaagaggaaatcaggaccaccaatcccgtggctacggagcagtatggttctgtatctaccaacctccagagcggcaacacacaagcagctacctcagatgtcaacacacaaggcgttcttccaggcatggtctggcaggacagagacgtgtacctgcaggggcccatctgggcaaaaattccacacacggacggacattttcacccctctcccctcatgggcggatttggacttaaacaccctcctccacagattctcattaagaataccccggtacctgcgaatccttcgaccaccttcagcgcggcaaagtttgcttccttcatcacacagtattccacggggcaggtcagcgtggagatcgagtgggagctgcagaaggagaacagcaaacgctggaatcccgaaattcagtacacttccaactacaacaaatctgttaatgtggactttactgtggacactaatggggtgtattcagagcctcgccctattggcaccagatacctgactcgtaatctgtaa

SEQ ID NO: 297 - DNA, 3159 bp, Adeno-associated virus
gattgatttagcggccgcgaattcgcccttgctgcgtcaactggaccaatgagaactttcccttcaacgattgcgtcgacaagatggtgatctggtgggaggagggaaagatgaccgccaaggtcgtggagtcggccaaagccattctcggaggaagcaaggtgcgtgtggaccaaaagtgcaagtcttcggcccagatcgacccgactcccgtgatcgtcacctccaacaccaacatgtgcgccgtgattgatggaaactcaacgaccttcgagcaccagcagccgttgcaagaccggatgttcaaatttgaacttacccgccgtctggatcatgactttggaaaggtcaccaagcaggaagtgaaagactttttccggtgggcaaaggatcacgtggttgaggtggagcatgagttctacgtcaaaaagggtggagccaaaaaaagacccgcccccagtgacgcagatataagtgagcccaaacgggcgcgcgagtcagttgcgcagccatcgacgtcagacgcggaagcttcgatcaactacgcggacaggtaccaaaacaaatgttctcgtcacgtgggcatgaatctgatgctgtttccctgcagacaatgcgagagaatgaatcagaattcaaatatctgcttcactcacggacagaaagactgtccatagtgctttcccgtgtcagaatctcaacccgtttctgtcgtcaaaaaggcgtatcagaaactgtgctacattcatcacatcatgggaaaggtgccagacgcttgcactgcttgcgacctggtcaatgtggatttggatgactgcatctctgaacaataaatgatttaaatcaggtatggctgccgatggttatcttccagattggctcgaggacactctctctgaaggaataagacagtggtggaagctcaaacctggcccaccaccaccaaagcccgcagagcggcataaggacgacagcaggggtcttgtgcttcctggatacaagtacctcggacccttcaacggactcgacaagggagagccggtcaacgaggcagacgccgcggccctcgagcacgacaaggcctacgaccggcagctcgacagcggagacaacccgtacctcaagtacaaccacgccgacgcggagtttcaggagcgccttaaagaagatacgtcttttgggggcaacctcggacgagcagtcttccaggcgaaaaagagggttcttgaacctctgggcctggttgaggaacctgttaagacggctccgggaaaaaagaggccggtagagcactctcctgtggagccagactcctcctcgggaaccggaaaagcgggcaaccagcctgcaagaaaaagattgaatttcggtcagactggagacgcagactccgtacctgacccccagcctctcggacagccaccagcatccccctctggtctgggaactaatacgatggctacaggcagtggcgcaccaatggcagacaataacgagggcgccgacggagtgggtaattcctcgggaaattggcattgcgattccacatggatgggcgacagagtcgtcaccaccagcacccgcacctgggccctgcccacctacaacaaccacctctacaagcagatttccagccaatcaggagccagcaacgacaaccactactttggctacagcaccccttgggggtattttgacttcaacagattccactgccacttttcgccacgcgactggcagagactcatcaacaacaactggggattccggcccaaaagactcaacttcaagctgtttaacattcaagtcaaggaggtcacgcagaatgacggtacgacgacgattgccaataaccttaccagcacggttcaggtgtttactgacttggagtaccagctcccgtacgtcctcggctcggcgcatcaaggatgcctcccgccgttcccagcagacgtcttcatggtgccacagtatggatacctcaccctgaacaacgggagtcaggcggtaggacgctcttccttttactgcctggagtactttccttctcagatgcttcgcaccggaaacaactttaccttcagctacacttttgaagacgttcctttccacagcagctacgctcacagtcaaagtctggaccgtctcatgaatcctctcatcgaccagtacctgtattacttgagcagaacaaacactccaagcggaaccactacgcagtccaggcttcagttttctcaggccggagcgagtgacattcgggaccagtctaggaactggcttcctggaccctgttaccgccagcagcgagtatcaaagacagctgcggataacaacaacagtgaatactcgtggactggagctaccaagtaccacctcaatggcagagactctctggtgaatccgggcccggccatggccagccacaaggacgatgaagaaaagttttttcctcaaagcggggttctcatctttgggaagcaaggctcagagaaaacaaatgtggacattgaaaaggtcatgattacagacgaagaggaaatcaggaccaccaatcccgtggctacggagcagtatggttctgtatctaccaacctccagagcggcaacacacaagcagctacctcagatgtcaacacacaaggcgttcttccaggcatggtctggcaggacagagacgtgtacctgcaggggcccatctgggcaaaaattccacacacggacggacattttcacccctctcccctcatgggcggatttggacttaaacaccctcctccacagattctcattaagaataccccggtacctgcgaatccttcgaccaccttcagcgcggcaaagtttgcttccttcatcacacagtattccacggggcaggtcagcgtggagatcgagtgggagctgcagaaggagaacagcaaacgctggaatcccgaaattcagtacacttccaactacaacaaatctgttaatgtggactttactgtggacactaatggggtgtattcagagcctcgccctattggcaccagatacctgactcgtaatctgtaattgcttgttaatcaataaaccgtttaattcgtttcagttgaactttggtctctgcgaagggcgaattcgtttaaacctgcaggactagtccctttagtgagg

SEQ ID NO: 298 - protein, 735 aa, Adeno-associated virus
MAADGYLPDWLEDTLSEGIRQWWKLKPGPPPPKPAERHKDDSRGLVLPGYKYLGPFNGLDKGEPVNEADAAALEHDKAYDRQLDSGDNPYLKYNHADAEFQERLKEDTSFGGNLGRAVFQAKKRVLEPLGLVEEPVKTAPGKKRPVEHSPVEPDSSSGTGKAGNQPARKRLNFGQTGDADSVPDPQPLGQPPASPSGLGTNTMATGSGAPMADNNEGADGVGNSSGNWHCDSTWMGDRVVTTSTRTWALPTYNNHLYKQISSQSGASNDNHYFGYSTPWGYFDFNRFHCHFSPRDWQRLINNNWGFRPKRLNFKLFNIQVKEVTQNDGTTTIANNLTSTVQVFTDLEYQLPYVLGSAHQGCLPPFPADVFMVPQYGYLTLNNGSQAVGRSSFYCLEYFPSQMLRTGNNFTFSYTFEDVPFHSSYAHSQSLDRLMNPLIDQYLYYLSRTNTPSGTTTQSRLQFSQAGASDIRDQSRNWLPGPCYRQQRVSKTAADNNNSEYSWTGATKYHLNGRDSLVNPGPAMASHKDDEEKFFPQSGVLIFGKQGSEKTNVDIEKVMITDEEEIRTTNPVATEQYGSVSTNLQSGNTQAATSDVNTQGVLPGMVWQDRDVYLQGPIWAKIPHTDGHFHPSPLMGGFGLKHPPPQILIKNTPVPANPSTTFSAAKFASFITQYSTGQVSVEIEWELQKENSKRWNPEIQYTSNYNKSVNVDFTVDTNGVYSEPRPIGTRYLTRNL

SEQ ID NO: 299 - DNA, 2205 bp, Adeno-associated virus
atggctgccgatggttatcttccagattggctcgaggacactctctctgaaggaataagacagtggtggaagctcaaacctggcccaccaccaaagcccgcagagcggcataaggacgacagcaggggtcttgtgcttcctggatacaagtacctcggacccttcaacggactcgacaagggagagccggtcaacgaggcagacgccgcggccctcgagcacgacaaggcctacgaccggcagctcgacagcggagacaacccgtacctcaagtacaaccacgccgacgcggagtttcaggagcgccttaaagaagatacgtcttttgggggcaacctcggacgagcagtcttccaggcgaaaaagagggttcttgaacctctgggcctggttgaggaacctgttaagacggctccgggaaaaaagaggcccgtagagcactctcctgtggagccagactcctcctcgggaaccggaaaagcgggcaaccagcctgcaagaaaaagattgaatttcggtcagactggagacgcagactccgtacctgacccccagcctctcggacagccaccagcagccccctctggtctgggaactaatacgatggctacaggcagtggcgcaccaatggcagacaataacgagggcgccgacggagtgggtaattcctcgggagattggcattgcgattccacatggatgggcgacagagtcatcaccaccagcacccgcacctgggccctgcccacctacaacaaccacctctacaagcagatttccagccaatcaggagccagcaatgacaaccactactttggctacagcaccccttgggggtattttgacttcaacagattccactgccacttttcgccacgcgactggcagagactcatcaacaacaactggggattccggcccaaaagactcaacctcaagctgtttaacattcaagtcaaggaggtcacgcagaatgacggtacgacgacgattgccaataaccttaccagcacggttcaggtgtttactgacttggagtaccagctcccgtacgtcctcggctcggcgcatcaaggatgcctcccgccgttcccagcagacgtcttcatggtgccacagtatggatacctcaccctgaacaacgggagtcaggcggtaggacgctcttccttttactgcctggagtactttccttctcagatgcttcgtaccggaaacaactttaccttcagctacacttttgaagacgttcctttccacagcagctacgctcacagtcaaagtctggaccgtctcatgaatcctctcatcgaccagtacctgtattacttgagcagaacaaacactccaagcggaaccactacgcagtccaggcttcagttttctcaggccggagcgagtgacattcgggaccagtctaggaactggcttcctggaccctgttaccgccagcagcgagtatcaaagacagctgcggataacaacaacggtgaatactcgtggactggagctaccaagtaccacctcaatggcagagactctctggtgaatccgggcccggccatggccagccacaaggacgatgaagaaaagttttttcctcaaagcggggttctcatctttgggaagcaaggctcagagaaaacaaatgtggacattgaaaaggtcatgattacagacgaagaggaaatcaggaccaccaatcccgtggctacggagcagtatggttctgtatctaccaacctccagagcggcaacacacgagcagctacctcagatgtcaacacacaaggcgttcttccaggcatggtctggcaggacagagacgtgtacctgcaggggcccatctgggcaaaaattccacacacggacggacattttcacccctctcccctcatgggcggatttggacttaaacaccctcctccacagattctcattaagaataccccggtacctgcgaatccttcgaccaccttcagcgcggcaaagtttgcttccttcatcacacagtattccacggggcaggtcagcgtggagatcgagtgggagctgcagaaggagaacagcaaacgctggaatcccgaaattcagtacacttccaactacaacaaatctgttaatgtggactttactgtggacactaatggggtgtattcagagcctcgccctattggcaccagatacctgactcgtaatctgtaa

SEQ ID NO: 300 - DNA, 3156 bp, Adeno-associated virus
cgattgaatttagcggccgcgaattcgcccttgctgcgtcaacggaccaatgagaactttcccttcaacgattgcgtcgacaagatggtgatctggtgggaggagggaaagatgaccgccaaggtcgtggagtcggccaaagccattctcggaggaagcaaggtgcgtgtggaccaaaagtgcaagtcttcggcccagatcgacccgactcccgtgatcgtcacctccaacaccaacatgtgcgccgtgattgatggaaactcaacgaccttcgagcaccagcagccgttgcaagaccggatgttcaaatttgaacttacccgccgtctggatcatgactttggaaaggtcaccaagcaggaagtgaaagactttttccggtgggcaaaggatcacgtggttgaggtggagcatgagttctacgtcaaaaagggtggagccaaaaaaagacccgcccccagtgacgcagatataagtgagcccaaacgggcgcgcgagtcagttgcgcagccatcgacgtcagacgcggaagcttcgatcaactacgcggacaggtaccaaaacaaatgttctcgtcacgtgggcatgaatctgatgctgtttccctgcagacaatgcgagcgaatgaatcagaattcaaatatctgcttcactcacggacagaaagactgtttagagtgctttcccgtgtcagaatctcaacccgtttctgtcgtcaaaaaggcgtatcagaaactgtgctacattcatcacatcatgggaaaggtgccagacgcttgcactgcttgcgacctggtcaatgtggatttggatgactgcatctctgaacaataaatgatttaaatcaggtatggctgccgatggttatcttccagattggctcgaggacactctctctgaaggaataagacagtggtggaagctcaaacctggcccaccaccaaagcccgcagagcggcataaggacgacagcaggggtcttgtgcttcctggatacaagtacctcggacccttcaacggactcgacaagggagagccggtcaacgaggcagacgccgcggccctcgagcacgacaaggcctacgaccggcagctcgacagcggagacaacccgtacctcaagtacaaccacgccgacgcggagtttcaggagcgccttaaagaagatacgtcttttgggggcaacctcggacgagcagtcttccaggcgaaaaagagggttcttgaacctctgggcctggttgaggaacctgttaagacggctccgggaaaaaagaggcccgtagagcactctcctgtggagccagactcctcctcgggaaccggaaaagcgggcaaccagcctgcaagaaaaagattgaatttcggtcagactggagacgcagactccgtacctgacccccagcctctcggacagccaccagcagccccctctggtctgggaactaatacgatggctacaggcagtggcgcaccaatggcagacaataacgagggcgccgacggagtgggtaattcctcgggagattggcattgcgattccacatggatgggcgacagagtcatcaccaccagcacccgcacctgggccctgcccacctacaacaaccacctctacaagcagatttccagccaatcaggagccagcaatgacaaccactactttggctacagcaccccttgggggtattttgacttcaacagattccactgccacttttcgccacgcgactggcagagactcatcaacaacaactggggattccggcccaaaagactcaacctcaagctgtttaacattcaagtcaaggaggtcacgcagaatgacggtacgacgacgattgccaataaccttaccagcacggttcaggtgtttactgacttggagtaccagctcccgtacgtcctcggctcggcgcatcaaggatgcctcccgccgttcccagcagacgtcttcatggtgccacagtatggatacctcaccctgaacaacgggagtcaggcggtaggacgctcttccttttactgcctggagtactttccttctcagatgcttcgtaccggaaacaactttaccttcagctacacttttgaagacgttcctttccacagcagctacgctcacagtcaaagtctggaccgtctcatgaatcctctcatcgaccagtacctgtattacttgagcagaacaaacactccaagcggaaccactacgcagtccaggcttcagttttctcaggccggagcgagtgacattcgggaccagtctaggaactggcttcctggaccctgttaccgccagcagcgagtatcaaagacagctgcggataacaacaacggtgaatactcgtggactggagctaccaagtaccacctcaatggcagagactctctggtgaatccgggcccggccatggccagccacaaggacgatgaagaaaagttttttcctcaaagcggggttctcatctttgggaagcaaggctcagagaaaacaaatgtggacattgaaaaggtcatgattacagacgaagaggaaatcaggaccaccaatcccgtggctacggagcagtatggttctgtatctaccaacctccagagcggcaacacacgagcagctacctcagatgtcaacacacaaggcgttcttccaggcatggtctggcaggacagagacgtgtacctgcaggggcccatctgggcaaaaattccacacacggacggacattttcacccctctcccctcatgggcggatttggacttaaacaccctcctccacagattctcattaagaataccccggtacctgcgaatccttcgaccaccttcagcgcggcaaagtttgcttccttcatcacacagtattccacggggcaggtcagcgtggagatcgagtgggagctgcagaaggagaacagcaaacgctggaatcccgaaattcagtacacttccaactacaacaaatctgttaatgtggactttactgtggacactaatggggtgtattcagagcctcgccctattggcaccagatacctgactcgtaatctgtaattgcttgttaatcaataaaccgtttaattcgtttcagttgaactttggtctctgcgaagggcgaattcgtttaaacctgcaggactagtccctttagtgag

SEQ ID NO: 301 - protein, 734 aa, Adeno-associated virus
MAADGYLPDWLEDTLSEGIRQWWKLKPGPPPKPAERHKDDSRGLVLPGYKYLGPFNGLDKGEPVNEADAAALEHDKAYDRQLDSGDNPYLKYNHADAEFQERLKEDTSFGGNLGRAVFQAKKRVLEPLGLVEEPVKTAPGKKRPVEHSPVEPDSSSGTGKAGNQPARKRLNFGQTGDADSVPDPQPLGQPPAAPSGLGTNTMATGSGAPMADNNEGADGVGNSSGDWHCDSTWMGDRVITTSTRTWALPTYNNHLYKQISSQSGASNDNHYFGYSTPWGYFDFNRFHCHFSPRDWQRLINNNWGFRPKRLNLKLFNIQVKEVTQNDGTTTIANNLTSTVQVFTDLEYQLPYVLGSAHQGCLPPFPADVFMVPQYGYLTLNNGSQAVGRSSFYCLEYFPSQMLRTGNNFTFSYTFEDVPFHSSYAHSQSLDRLMNPLIDQYLYYLSRTNTPSGTTTQSRLQFSQAGASDIRDQSRNWLPGPCYRQQRVSKTAADNNNGEYSWTGATKYHLNGRDSLVNPGPAMASHKDDEEKFFPQSGVLIFGKQGSEKTNVDIEKVMITDEEEIRTTNPVATEQYGSVSTNLQSGNTRAATSDVNTQGVLPGMVWQDRDVYLQGPIWAKIPHTDGHFHPSPLMGGFGLKHPPPQILIKNTPVPANPSTTFSAAKFASFITQYSTGQVSVEIEWELQKENSKRWNPEIQYTSNYNKSVNVDFTVDTNGVYSEPRPIGTRYLTRNL

SEQ ID NO: 302 - DNA, 2208 bp, Adeno-associated virus
atggctgccgatggttatcttccagattggctcgaggacactctctctgaaggaataagacagtggtggaagctcaaacctggcccaccaccaccaaagcccgcagagcggcataaggacgacagcaggggtcttgtgcttcctgggtacaagtacctcggacccttcaacggactcgacaagggagagccggtcaacgaggcagacgccgcggccctcgagcacgacaaggcctacgaccggcagctcgacagcggagacaacccgtacctcaagtacgaccacgccgacgcggagtttcaggagcgccttaaagaagatacgtcttttgggggcaacctcggacgagcagtcttccaggcaaaaaagagggttcttgaacctctgggcctggttgaggagcctgttaagacggctccgggaaaaaagaggccggtagagcactctcctgtggagccagactcctcctcgggaaccggaaaagcgggcaaccagcctgcaagaaagagattgaatttcggtcagactggagacgcagactccgtacctgacccccagcctctcggacagccaccagcagccccctctggtctgggaactaatacgatggctacaggcagtggcgcaccaatggcagacaataacgatggcgccgacggagtgggtaattcctcgggaaattggcattgcgattccacatggatgggcgacagagtcatcaccaccagcacccgaacctgggctctgcccacctacaacaaccatctgtacaagcagatttccagccaatcaggagccagcaacgacaaccactactttggctacagcaccccttgggggtattttgacttcaacagattccactgccacttttcaccacgtgactggcaaagactcatcaacaacaactggggattccggcccaagagactcaacttcaagctctttaacattcaagtcagagaggtcacgcagaatgatggtacgacgacgattgccaataaccttaccagcacggttcaggtgtttactgactcggagtaccagctcccgtacgtcctcggctcggcgcatcaaggatgcctcccgccgttcccagcagacgtcttcatggtgccacagtatggatacctcaccctgaacaacgggagtcaggcagtaggacgctcttcattttactgcctggagtacttcccttctcagatgctgcgtaccggaaacaactttaccttcagctacacctttgaggatgttcctttccacagcagctacgctcacagccagagtttggaccgtctcatgaatcctctcatcgaccagtacctgtattacttgagcagaacaaacactccaagcggaaccaccacgcagtccaggcttcagttttctcaggccggagcgagtgacattcgggatcagtctaggaactggcttcctggaccctgttaccgccagcagcgagtatcaaagacatctgcggacaacaacaacagtgaatactcgtggattggagctaccaagtaccacctcaatggcagagactctctggtgaatccgggcccggcaatggccagccacaaggacgatgaagaaaagttttttcctcagagcggggttctcatctttggaaaacaaggatcagagaaaacaaatgtggacattgaaaaggtcatgattacagacgaagaggaaatcagaaccaccaatcccgtggccacggagcagtatggttctgtatctaccaacctccagagcggcaacacacaagcatctactgcagatgtcaacacacaaggcgttcttccaggcatggtctggcaggacagagacgtgtacctgcaggggcctatctgggcaaagattccgcacacggacggacattttcacccctctcccctcatgggcggattcggacttaaacaccctcctccacagattctcatcaaaaacaccccggtacctgcgaatccttcgaccaccttcagtgcggcaaagtttgcttccttcatcacacagtattccacggggcgggtcagcgtggagatcgagtgggagctacagaaggagaacagcaaacgctggaatcccgagatccagtacacttccaactacaacaaatctgttaatgtggactttactgtggacactaatggtgtgtattcagagcctcgccccattggcaccagatacctgactcgtaatctgtaa

SEQ ID NO: 303 - protein, 735 aa, Adeno-associated virus
MAADGYLPDWLEDTLSEGIRQWWKLKPGPPPPKPAERHKDDSRGLVLPGYKYLGPFNGLDKGEPVNEADAAALEHDKAYDRQLDSGDNPYLKYDHADAEFQERLKEDTSFGGNLGRAVFQAKKRVLEPLGLVEEPVKTAPGKKRPVEHSPVEPDSSSGTGKAGNQPARKRLNFGQTGDADSVPDPQPLGQPPAAPSGLGTNTMATGSGAPMADNNDGADGVGNSSGNWHCDSTWMGDRVITTSTRTWALPTYNNHLYKQISSQSGASNDNHYFGYSTPWGYFDFNRFHCHFSPRDWQRLINNNWGFRPKRLNFKLFNIQVREVTQNDGTTTIANNLTSTVQVFTDSEYQLPYVLGSAHQGCLPPFPADVFMVPQYGYLTLNNGSQAVGRSSFYCLEYFPSQMLRTGNNFTFSYTFEDVPFHSSYAHSQSLDRLMNPLIDQYLYYLSRTNTPSGTTTQSRLQFSQAGASDIRDQSRNWLPGPCYRQQRVSKTSADNNNSEYSWIGATKYHLNGRDSLVNPGPAMASHKDDEEKFFPQSGVLIFGKQGSEKTNVDIEKVMITDEEEIRTTNPVATEQYGSVSTNLQSGNTQASTADVNTQGVLPGMVWQDRDVYLQGPIWAKIPHTDGHFHPSPLMGGFGLKHPPPQILIKNTPVPANPSTTFSAAKFASFITQYSTGRVSVEIEWELQKENSKRWNPEIQYTSNYNKSVNVDFTVDTNGVYSEPRPIGTRYLTRNL

SEQ ID NO: 304 - DNA, 2217 bp, Adeno-associated virus
atggctgccgatggttatcttccagattggctcgaggacaacctctctgagggcattcgcgagtggtgggacttgaaacctggagccccgaaacccaaagccaaccagcaaaagcaggacgacggccggggtctggtgcttcctggctacaagtacctcggacccttcaacggactcgacaagggggagcccgtcaacgcggcggacgcagcggccctcgagcacgacaaggcctacgaccagcagctcaaagcgggtgacaatccgtacctgcggtataaccacgccgacgccgagtttcaggagcgtctgcaagaagatacgtcttttgggggcaacctcgggcgagcagtcttccaggccaagaagcgggttctcgaacctctcggtctggttgaggaaggcgctaagacggctcctggaaagaagagaccggtagagccatcaccccagcgttctccagactcctctacgggcatcggcaagacaggccagcagcccgcgaaaaagagactcaactttgggcagactggcgactcagagtcagtgcccgaccctcaaccaatcggagaaccccccgcaggcccctctggtctgggatctggtacaatggctgcaggcggtggcgctccaatggcagacaataacgaaggcgccgacggagtgggtagttcctcaggaaattggcattgcgattccgcatggctgggcgacagagtcatcaccaccagcacccgaccctgggccctccccacctacaacaaccacctctacaagcaaatctccaacgggacatcgggaggaagcaccaacgacaacacctacttcggctacagcaccccctgggggtattttgactttaacagattccactgccacttctcaccacgtgactggcagcgactcatcaacaacaactggggattccggcccaagagactcaacttcaagctcttcaacatccaggtcaaggaggtcacgcagaatgaaggcaccaagaccatcgccaataaccttaccagcacgattcaggtctttacggactcggaataccagctcccgtacgtcctcggctctgcgcaccagggctgcccgcctccgttcccggcggacgtcttcatgattcctcagtacgggtacctgactctgaacaacggcagtcaggccgtgggccgttcctccttctactgcctggagtactttccttctcaaatgcggagaacgggcaacaactttgagttcagctaccagtttgaggacgtgccttttcacagcagctacgcgcatagccaaagcctggaccggctgatgaaccccctcatcgaccagtacctgtactacctgtctcggactcagtccacgggaggtaccgcaggaactcagcagttgctattttctcaggccgggcctaataacatgtcggctcaggccaaaaactggctacccgggccctgctaccggcagcaacgcgtctccacgacactgtcgcaaaataacaacagcaactttgcttggaccggtgccaccaagtatcatctgaatggcagagactctctggtaaatcccggtgtcgctatggcaacgcacaaggacgacgaagagcgattttttccatccagcggagtcttgatgtttgggaaacagggagctggaaaagacaacgtggactatagcagcgttatgctaaccagtgaggaagaaatcaaaaccaccaacccagtggccacagaacagtacggcgtggtggccgataacctgcaacagcaaaacgccgctcctattgtaggggccgtcaacagtcaaggagccttacctggcatggtctggcagaaccgggacgtgtacctgcagggtcctatctgggccaagattcctcacacggacggcaactttcatccttcgccgctgatgggaggctttggactgaaacacccgcctcctcagatcctgattaagaatacacctgttcccgcggatcctccaactaccttcagtcaagccaagctggcgtcgttcatcacgcagtacagcaccggacaggtcagcgtggaaattgaatgggagctgcagaaagagaacagcaagcgctggaacccagagattcagtatacttccaactactacaaatctacaaatgtggactttgctgtcaatactgagggtacttattcagagcctcgccccattggcacccgttacctcacccgtaacctgtaa

SEQ ID NO: 305 - protein, 738 aa, Adeno-associated virus
MAADGYLPDWLEDNLSEGIREWWDLKPGAPKPKANQQKQDDGRGLVLPGYKYLGPFNGLDKGEPVNAADAAALEHDKAYDQQLKAGDNPYLRYNHADAEFQERLQEDTSFGGNLGRAVFQAKKRVLEPLGLVEEGAKTAPGKKRPVEPSPQRSPDSSTGIGKTGQQPAKKRLNFGQTGDSESVPDPQPIGEPPAGPSGLGSGTMAAGGGAPMADNNEGADGVGSSSGNWHCDSAWLGDRVITTSTRPWALPTYNNHLYKQISNGTSGGSTNDNTYFGYSTPWGYFDFNRFHCHFSPRDWQRLINNNWGFRPKRLNFKLFNIQVKEVTQNEGTKTIANNLTSTIQVFTDSEYQLPYVLGSAHQGCPPPFPADVFMIPQYGYLTLNNGSQAVGRSSFYCLEYFPSQMRRTGNNFEFSYQFEDVPFHSSYAHSQSLDRLMNPLIDQYLYYLSRTQSTGGTAGTQQLLFSQAGPNNMSAQAKNWLPGPCYRQQRVSTTLSQNNNSNFAWTGATKYHLNGRDSLVNPGVAMATHKDDEERFFPSSGVLMFGKQGAGKDNVDYSSVMLTSEEEIKTTNPVATEQYGVVADNLQQQNAAPIVGAVNSQGALPGMVWQNRDVYLQGPIWAKIPHTDGNFHPSPLMGGFGLKHPPPQILIKNTPVPADPPTTFSQAKLASFITQYSTGQVSVEIEWELQKENSKRWNPEIQYTSNYYKSTNVDFAVNTEGTYSEPRPIGTRYLTRNL

SEQ ID NO: 306 - protein, 735 aa, Adeno-associated virus
MAADGYLPDWLEDTLSEGIRQWWKLKPGPPPPKPAERHKDDSRGLVLPGYKYLGPFNGLDKGEPVNEADAAALEHDKAYDRQLDSGDNPYLKYNHADAEFQERLKEDTSFGGNLGRAVFQAKKRVLEPLGLVEEPVKTAPGKKRPVEHSPVEPDSSSGTGKAGQQPARKRLNFGQTGDADSVPDPQPLGQPPAAPSGLGSTTMATGSGAPMADNNEGADGVGNSSGNWHCDSQWLGDRVITTSTRTWALPTYNNHLYKQISSQSGASNDNHYFGYSTPWGYFDFNRFHCHFSPRDWQRLINNNWGFRPKRLNFKLFNIQVKEVTQNDGTTTIANNLTSTVQVFTDSEYQLPYVLGSAHQGCLPPFPADVFMVPQYGYLTLNNGSQAVGRSSFYCLEYFPSQMLRTGNNFQFSYTFEDVPFHSSYAHSQSLDRLMNPLVDQYLYYLNKTQTNSGTLQQSRLLFSQAGPTNMSLQAKNWLPGPCYRQQRLSKQANDNNNSNFPWTAATKYHLNGRDSLVNPGPAMASHKDDEEKFFPMHGTLIFGKQGTNANDADLENVMITDEEEIRTTNPVATEQYGTVSNNLQNSNTGPTTGTVNHQGALPGMVWQDRDVYLQGPIWAKIPHTDGHFHPSPLMGGFGLKHPPPQIMIKNTPVPANPPTNFSSAKFASFITQYSTGQVSVEIEWELQKENSKRWNPEIQYTSNYNKSVNVDFTVDTNGVYSEPRPIGTRYLTRNL

SEQ ID NO: 307 - DNA, 3158 bp, Adeno-associated virus
gattgaatttagcggccgcgaattcgcccttgctgcgtcaactggaccaatgagaactttcctttcaatgattgcgtcgacaagatggtgatctggtgggaggagggaaagatgaccgccaaggtcgtggagtcggccaaagccattctcggaggaagcaaggtgcgcgcggaccagaaatgcaagtcctcggcccagatagacccgactcccgtgattgtcacctccaacaccaacatgtgcgccgtgattgacgggaactcaacgaccttcgaacaccagcagccgttgcaagaccggatgttcaaatttgaactcacccgccgtctggatcatgactttgggaaggtcaccaagcaggaagtcaaagactttttccggtgggcaaaggatcacgtggttgaggtggagcatgaattctacgtcaaaaagggtggagctaagaaaagacccgcccccagtgacgcagatataagtgagcccaaacgggcgcgcgagtcagttgcgcagccatcgacgtcagacgcggaagcttcgatcaactacgcgggcaggtaccaaaacaaatgttctcgtcacgtgggcatgaatctgatgctgtttccctgcagacaatgcgagagaatgaatcagaattcaaatatctgcttcactcacggacagaaagactgtttagagtgctttcccgtgtcagaatctcaacccgtttctgtcgtcaaaaaggcgtatcagaaactttgctacattcatcatatcatgggaaaggtgccagacgcttgcactgcctgcgatctggtcaatgtggatttggatgactgcatctctgaacaataaatgatttaaatcaggtatggctgccgatggttatcttccagattggctcgaggacactctctctgaaggaataagacagtggtggaagctcaaacctggcccaccaccaccaaagcccgcagagcggcataaggacgacagcaggggtcttgtgcttcctgggtacaagtacctcggacccttcaacggactcgacaagggggagccggtcaacgaggcagacgccgcggccctcgagcacgacaaggcctacgaccggcagctcgacagcggagacaacccgtacctcaagtacaaccacgccgacgcggagtttcaggagcgccttaaagaagatacgtcttttgggggcaacctcggacgagcagtcttccaggcaaaaaagagggttcttgaacctctgggcctggttgaggaacctgttaaaacggctccgggaaaaaagaggccggtagagcactctcctgtggagccagactcctcctcgggaaccggaaaagcgggccagcagcctgcaagaaaaagattgaatttcggtcagactggagacgcagactccgtacctgacccccagcctctcggacagccaccagcagccccctctggtctgggatctactacaatggctacaggcagtggcgcaccaatggcagacaataacgagggtgccgatggagtgggtaattcctcgggaaattggcattgcgattcccaatggctgggcgacagagtcatcaccaccagcacccgcacctgggccctgcccacctacaacaaccacctctacaagcaaatctccagccaatcaggagcctcaaacgacaaccactactttggctacagcaccccctgggggtattttgacttcaacagattccactgccacttttcaccacgtgactggcaaagactcatcaacaacaactggggattccgacccaagagactcaacttcaagctctttaacattcaagtcaaagaggtcacgcagaatgacggtacgacgacgattgccaataaccttaccagcacggttcaggtgtttactgactcggagtaccagctcccgtacgtcctcggctcggcgcatcaaggatgcctcccgccgtttccagcggacgtcttcatggtcccacagtatggatacctcaccctgaacaacgggagtcaggcagtaggacgctcttcattttactgcctggagtactttccttctcagatgctgcgtaccggaaacaactttcaattcagctacacttttgaagacgtgcctttccacagcagctacgctcacagccagagtctggatcggctgatgaatcctctggtcgaccagtacctgtattatctgaacaagacacaaacaaatagtggaactcttcagcagtctcggctactgtttagccaagctggacccaccaacatgtctcttcaagctaaaaactggctgcctggaccttgctacagacagcagcgtctgtcaaagcaggcaaacgacaacaacaacagcaactttccctggactgcagctacaaagtatcatctaaatggccgggactcgttggttaatccaggaccagctatggccagtcacaaggatgacgaagaaaagtttttccccatgcatggaacccttatatttggtaaacaaggaacaaatgccaacgacgcggatttggaaaatgtcatgattacagatgaagaagaaatcaggaccaccaatcccgtggctacggagcagtacggaactgtatcaaataatttgcaaaactcaaacactggtccaactactggaactgtcaatcaccaaggagcgttacctggtatggtgtggcaggatcgagacgtgtacctgcagggacccatttgggccaagattcctcacaccgatggacactttcatccttctccactgatgggaggttttggactcaaacacccacctcctcaaatcatgatcaaaaacactcccgttccagccaatcctcccacaaacttcagttctgccaagtttgcttctttcatcacacagtattccacggggcaggtcagcgtggagatcgagtgggagctgcagaaggagaacagcaaacgctggaatcccgaaattcagtacacttccaactacaacaaatctgttaatgtggactttactgtggacactaatggtgtgtattcagagcctcgccccattggcaccagatacctgactcgtaatctgtaattgcttgttaatcaataaaccgtttaattcgtttcagttgaactttggtctctgcgaagggcgaattcgtttaaacctgcaggactagtccctttagtga

SEQ ID NO: 308 - protein, 735 aa, Adeno-associated virus
MAADGYLPDWLEDTLSEGIRQWWKLKPGPPPPKPAERHKDDSRGLVLPGYKYLGPFNGLDKGEPVNEADAAALEHDKAYDRQLDSGDNPYLKYNHADAEFQERLKEDTSFGGNLGRAVFQAKKRVLEPLGLVEEPVKTAPGKKRPVEHPPVEPDSSSGTGKAGQQPARKRLNFGQTGDADSVPDPQPLGQPPAAPSGLGSTTMATGSGAPMADNNEGADGVGNSSGNWHCDSQWLGDRVITTSTRTWALPTYNNHLYKQISSQSGASNDNHYFGYSTPWGYFDFNRFHCHFSPRDWQRLINNNWGFRPKRLNFKLFNIQVKEVTQNDGTTTIANNLTSTVQVFTDSEYQLPYVLGSAHQGCLPPFPADVFMVPQYGYLTLNNGSQAVGRSSFYCLEYFPSQMLRTGNNFQFSYTFEDVPFHSSYAHSQSLDRLMNPLIDQYLYYLNKTQTNSGTLQQSRLLFSQAGPTNMSLQAKNRLPGPCYRQQRLSKQANDNNNSNFPWTAATKYHLNGRDSLVNPGPAMASHKDDEEKFFPMHGTLIFGKQGTNANDADLENVMITDEEEIRTTNPVATEQYGTVSNNLQNSNTGPTTGTVNHQGALPGMVWQDRDVYLQGPIWAKIPHTDGHFHPSPLVGGFGLKHPPPQIMIKNTPVPANPPTNFSSAKFASFITQYSTGQVSVEIEWELQKENSKRWNPEIQYTSNYNKSVNVDFTVDTNGVYSEPRPIGTRYLTRNL

SEQ ID NO: 309 - DNA, 3159 bp, Adeno-associated virus
gattgaatttagcggccgcgaattcgcccttgctgcgtcaactggaccaatgagaactttcctttcaatgattgcgtcgacaagatggtgatctggtgggaggagggaaagatgaccgccaaggtcgtggagtcggccaaagccattctcggaggaagcaaggtgcgcgtggaccagaaatgcaagtcctcggcccagatagacccgactcccgtgattgtcacctccaacaccgacatgtgcgccgtgattgacgggaactcaacgaccttcgaacaccagcagccgttgcaagaccggatgttcaaatttgaactcacccgccgtctggatcatgactttgggaaggtcaccaagcaggaagtcaaagactttttccggtgggcaaaggatcacgtggttgaggtggagcatgaattctacgtcaaaaagggtggagctaagaaaagacccgcccccagtgacgcagatataagtgagcccaaacgggcgcgcgagtcagttgcgcagccatcgacgtcagacgcggaagcttcgatcaactacgcggacaggtaccaaaacaaatgttctcgtcacgtgggcatgaatctgatgctgtttccctgcagacaatgcgagagaatgaatcagaattcaaatatctgcttcactcacggacagaaagactgtttagagtgctttcccgtgtcagaatctcaacccgtttctgtcgtcaaaaaggcgtatcagaaactttgctacattcatcatatcatgggaaaggtgccagacgcttgcactgcctgcgatctggtcaatgtggatttggatgactgcatctctgaacaataaatgatttaaatcaggtatggctgccgatggttatcttccagattggctcgaggacactctctctgaaggaataagacagtggtggaagctcaaacctggcccaccaccaccaaagcccgcagagcggcataaggacgacagcaggggtcttgtgcttcctgggtacaagtacctcggacccttcaacggactcgacaagggggagccggtcaacgaggcagacgccgcggccctcgagcacgacaaggcctacgaccggcagctcgacagcggagacaacccgtacctcaagtacaaccacgccgacgcggagtttcaggagcgccttaaagaagatacgtcttttgggggcaacctcggacgagcagtcttccaggcaaaaaagagggttcttgaacctctgggcctggttgaggaacctgttaaaacggctccgggaaaaaagaggccggtagagcaccctcctgtggagccagactcctcctcgggaaccggaaaagcgggccagcagcctgcaagaaaaagattgaatttcggtcagactggagacgcagactccgtacctgacccccagcctctcggacagccaccagcagccccctctggtctgggatctactacaatggctacaggcagtggcgcaccaatggcagacaataacgagggtgccgatggagtgggtaattcctcgggaaattggcattgcgattcccaatggctgggcgacagagtcatcaccaccagcacccgcacctgggccctgcccacctacaacaaccacctctacaagcaaatctccagccaatcaggagcctcaaacgacaaccactactttggctacagcaccccctgggggtattttgacttcaacagattccactgccacttttcaccacgtgactggcaaagactcatcaacaacaactggggattccgacccaagagactcaacttcaagctctttaacattcaagtcaaagaggtcacgcagaatgacggtacgacgacgattgccaataaccttaccagcacggttcaggtgtttactgactcggagtaccagctcccgtacgtcctcggctcggcgcatcaaggatgcctcccgccgtttccagcggacgtcttcatggtcccacagtatggatacctcaccctgaacaacgggagtcaggcagtaggacgctcttcattttactgcctggagtactttccttctcagatgctgcgtaccggaaacaactttcagttcagctacacttttgaagacgtgcctttccacagcagctacgctcacagccagagtctggatcggctgatgaatcctctgatcgaccagtacctgtattatctgaacaagacacaaacaaatagtggaactcttcagcagtctcggctactgtttagccaagctggacccaccaacatgtctcttcaagctaaaaaccggctgcctggaccttgctacagacagcagcgtctgtcaaagcaggcaaacgacaacaacaacagcaactttccctggaccgcagctacaaagtatcatctaaatggccgggactcgttggttaatccaggaccagctatggccagtcacaaggatgacgaagaaaagtttttccccatgcatggaacccttatatttggtaaacaaggaacaaatgccaacgacgcggatttggaaaatgtcatgattacagatgaagaagaaatcaggaccaccaatcccgtggctacggagcagtacggaactgtatcaaataatttgcaaaactcaaacactggtccaactactggaactgtcaatcaccaaggagcgttacctggtatggtgtggcaggatcgagacgtgtacctgcagggacccatttgggccaagattcctcacaccgatggacactttcatccttctccactggtgggaggttttggactcaaacacccacctcctcaaatcatgatcaaaaacactcccgttccagccaatcctcccacaaacttcagttctgccaagtttgcttctttcatcacacagtattccacggggcaggtcagcgtggagatcgagtgggagctgcagaaggagaacagcaaacgctggaatcccgaaattcagtacacttccaactacaacaaatctgttaatgtggactttactgtggacactaatggtgtgtattcagagcctcgccccattggcaccagatacctgactcgtaatctgtaattgcttgttaatcaataaaccgtttaattcgtttcagttgaactttggtctctgcgaagggcgaattcgtttaaacctgcaggactagtccctttagtgag

SEQ ID NO: 310 - DNA, 2208 bp, Adeno-associated virus
atggctgccgatggttatcttccagattggctcgaggacactctctctgaaggaataagacagtggtggaagctcaaacctggcccaccaccaccaaagcccgcagagcggcataaggacgacagcaggggtcttgtgcttcctgggtacaagtaccttggacccttcaacggactcgacaagggagagccggtcaacgaggcagacgccgcggccctcgagcacgacaaggcctacgaccggcagctcgacagcggagacaacccgtaccccaagtacaaccacgccgacgcggagttccaggagcgtcttaaagaagatacgtcttttgggggcaacctcggacgagcagtcttccaggcgaaaaagagggttcttgaacctctgggcctggttgaggaacctgttaagacggctccgggaaaaaagaggccggtagagcactctcctgcggagccagactcctcctcgggaaccggaaaagcgggccagcagcctgcaagaaagagattgaatttcggtcagactggagacgcagactccgtacctgacccccagcctctcggacagccaccagcagccccctctggtctgggaactaatacgatggctacaggcagtggcgcaccaatggcagacaataacgagggcgccgacggagtgggtaattcctcgggaaattggcattgcgattccacatggatgggcgacagagtcatcaccaccagcacccgcacctgggctctgcccacctacaacaaccacctctacaagcagatttccagccaatcaggagcctcaaacgacaaccactactttggctacagcaccccttgggggtattttgacttcaacagattccactgccacttttcgccacgtgactggcaaagactcatcaacaacaattggggattccggcccaaaagactcaacttcaagctctttaacattcaagtcaaggaggtcacgcagaatgacggtacgacgacgattgccaataaccttaccagcacggttcaggtgtttactgactcggagtaccagctcccgtacgtcctcggctcggcgcatcaaggatgcctcccgccgttcccagcagacgtcttcatggtgccacagtatggatacctcaccctgaacaacgggagtcaggcagtaggacgctcttcattttactgcctggagtactttccttctcagatgctgcgtaccggaaacaactttaccttcagctacacctttgaggacgttcctttccacagcagctacgcccacagccagagtttggaccgtctcatgaatcctctcatcgaccagtacctgtattacttgagcagaacaaacactccaagcggaaccaccacgcagtcaaggcttcagttttctcaggccggagcaagtgacattcgggaccagtctaggaactggcttcctggaccctgttaccgccagcagcgagtatcaaagacatctgcggataacaacaacagtgaatactcgtggactggagctaccaagtaccaccttaatggaagagactctctggtgaatccgggcccggccatggccagccacaaggacgatgaagaaaagttttttcctcagagcggggttctcatctttggaaaacaagactcgggaaaaactaatgtggacattgaaaaggtcatgattacagacgaagaggaaatcaggaccaccaatcccgtggctacggagcagtatggttctgtatctaccaacctccagagcggcaacacacaagcagctacctcagatgtcaacacacaaggcgttcttccaggcatggtgtggcaggacagagacgtgtacctgcaggggcccatctgggcaaagattccacacacggacggacattttcacccctctcccctcatgggcggattcggacttaaacaccctcccccgcagattctcatcaagaacaccccggtacctgcgaatccttcgactaccttcagtgcggcaaagtttgcttccttcattacacagtactccacggggcaggtcagcgtggagatcgagtgggagctgcagaaggagaacagcaaacgctggaatcccgagattcagtacacttccaactacaacaaatctgttaatgtggactttactgtggacactaatggtgtgtattcagagcctcgccccattggcaccaggtacctgactcgtaatctgtaa

SEQ ID NO: 311 - protein, 735 aa, Adeno-associated virus
MAADGYLPDWLEDTLSEGIRQWWKLKPGPPPPKPAERHKDDSRGLVLPGYKYLGPFNGLDKGEPVNEADAAALEHDKAYDRQLDSGDNPYPKYNHADAEFQERLKEDTSFGGNLGRAVFQAKKRVLEPLGLVEEPVKTAPGKKRPVEHSPAEPDSSSGTGKAGQQPARKRLNFGQTGDADSVPDPQPLGQPPAAPSGLGTNTMATGSGAPMADNNEGADGVGNSSGNWHCDSTWMGDRVITTSTRTWALPTYNNHLYKQISSQSGASNDNHYFGYSTPWGYFDFNRFHCHFSPRDWQRLINNNWGFRPKRLNFKLFNIQVKEVTQNDGTTTIANNLTSTVQVFTDSEYQLPYVLGSAHQGCLPPFPADVFMVPQYGYLTLNNGSQAVGRSSFYCLEYFPSQMLRTGNNFTFSYTFEDVPFHSSYAHSQSLDRLMNPLIDQYLYYLSRTNTPSGTTTQSRLQFSQAGASDIRDQSRNWLPGPCYRQQRVSKTSADNNNSEYSWTGATKYHLNGRDSLVNPGPAMASHKDDEEKFFPQSGVLIFGKQDSGKTNVDIEKVMITDEEEIRTTNPVATEQYGSVSTNLQSGNTQAATSDVNTQGVLPGMVWQDRDVYLQGPIWAKIPHTDGHFHPSPLMGGFGLKHPPPQILIKNTPVPANPSTTFSAAKFASFITQYSTGQVSVEIEWELQKENSKRWNPEIQYTSNYNKSVNVDFTVDTNGVYSEPRPIGTRYLTRNL

SEQ ID NO: 312 - DNA, 2208 bp, Adeno-associated virus
atggctgccgatggttatcttccagattggctcgaggacactctctctgaaggaataagacagtggtggaagctcaaacctggcccaccaccaccaaagcccgcagagcggcataaggacgacagcaggggtcttgtgcttcctgggtacaagtaccttggacccttcaacggactcgacaagggagagccggtcaacgaggcagacgccgcggccctcgagcacgacaaggcctacgaccggcagctcgacggcggagacaacccgtacctcaagtacaaccacgccgacgcggagttccaggagcgtcttaaagaagatacgtcttttgggggcaacctcggacgagcagtcttccaggcgaaaaagagggttcttgaacctctgggcctggttgaggaacctgttaagacggctccgggaaaaaagaggccggtagagcactctcttgcggagccagactcctcctcgggaaccggaaaagcgggccagcagcctgcaagaaggagattgaatttcggtcagactggagacgcagactccgtacctgacccccagcctctcggacagccaccagcagccccctctggtctgggaactaatacgatggctacaggcagtggcgcaccaatggcagacaataacgagggcgccgacggagtgggtaattcctcgggaaattggcattgcgattccacatggatgggcgacagagtcatcaccaccagcacccgcacctgggctctgcccacctacaacaaccacctctacaggcagatttccagccaatcaggagcctcaaacgacaaccactactttggctacagcaccccttgggggtattttgacttcaacagattccactgccacttttcgccacgtgactggcaaagactcatcaacaacaattggggatcccggcccaaaagactcaacttcaagctctttaacattcaagtcaaggaggtcacgcagaatgacggtacgacgacgattgccaataaccttaccagcacggttcaggtgtttactgactcggagtaccagctcccgtacgtcctcggctcggcgcatcaaggatgcctcccgccgttcccagcagacgtcttcatggtgccacagtatggatacctcaccctgaacaacgggagtcaggcagtaggacgctcttcattttactgcctggagtactttccttctcagatgctgcgtaccggaaacaactttaccttcagctacacctttgaggacgttcctttccacagcagctacgcccacagccagagtttggaccgtctcatgaatcctctcgtcgaccagtacctgtattacttgagcagaacaaacactccaagcggaaccaccacgcagtcaaggcttcagttttctcaggccggagcaagtgacattcgggaccagtctaggaactggcttcctggaccctgttaccgccagcagcgagtatcaaagacatctgcggataacaacaacagtgaatactcgtggactggagctaccaagtaccaccttaatggaagagactctctggtgaatccgggcccggccatggccagccacaaggacgatgaagaaaagttttttcctcagagcggggttctcatctttggaaaacaagactcgggaaaaactaatgtggacattgaaaaggtcatgattacagacgaagaggaaatcaggaccaccaatcccgtggctacggagcagtatggttctgtatctaccaacctccagagcggcaacacacaagcagctacctcagatgtcaacacacaaggcgttcttccaggcatggtgtggcaggacagagacgtgtacctgcaggggcccatctgggcaaagattccacacacggacggacattttcacccctctcccctcatgggcggattcggacttaaacaccctcccccgcagattctcatcaagaacaccccggtacctgcgaatccttcgactaccttcagtgcggcaaagtttgcttccttcattacacagtactccacggggcaggtcagcgtggagatcgagtgggagctgcagaaggagaacagcaaacgctggaatcccgagattcagtacacttccaactacaacaaatctgttaatgtggactttactgtggacactaatggtgtgtattcagagcctcgccccattggcaccagatacctgactcgtaatctgtaa

SEQ ID NO: 313 - protein, 735 aa, Adeno-associated virus
MAADGYLPDWLEDTLSEGIRQWWKLKPGPPPPKPAERHKDDSRGLVLPGYKYLGPFNGLDKGEPVNEADAAALEHDKAYDRQLDGGDNPYLKYNHADAEFQERLKEDTSFGGNLGRAVFQAKKRVLEPLGLVEEPVKTAPGKKRPVEHSLAEPDSSSGTGKAGQQPARRRLNFGQTGDADSVPDPQPLGQPPAAPSGLGTNTMATGSGAPMADNNEGADGVGNSSGNWHCDSTWMGDRVITTSTRTWALPTYNNHLYRQISSQSGASNDNHYFGYSTPWGYFDFNRFHCHFSPRDWQRLINNNWGSRPKRLNFKLFNIQVKEVTQNDGTTTIANNLTSTVQVFTDSEYQLPYVLGSAHQGCLPPFPADVFMVPQYGYLTLNNGSQAVGRSSFYCLEYFPSQMLRTGNNFTFSYTFEDVPFHSSYAHSQSLDRLMNPLVDQYLYYLSRTNTPSGTTTQSRLQFSQAGASDIRDQSRNWLPGPCYRQQRVSKTSADNNNSEYSWTGATKYHLNGRDSLVNPGPAMASHKDDEEKFFPQSGVLIFGKQDSGKTNVDIEKVMITDEEEIRTTNPVATEQYGSVSTNLQSGNTQAATSDVNTQGVLPGMVWQDRDVYLQGPIWAKIPHTDGHFHPSPLMGGFGLKHPPPQILIKNTPVPANPSTTFSAAKFASFITQYSTGQVSVEIEWELQKENSKRWNPEIQYTSNYNKSVNVDFTVDTNGVYSEPRPIGTRYLTRNL

SEQ ID NO: 314 - protein, 738 aa, Adeno-associated virus
MAADGYLPDWLEDNLSEGIREWWDLKPGAPKPKANQQKQDDGRGLVLPGYKYLGPFNGLDKGEPVNAADAAALEHDKAYDQQLKAGDNPYLRYNHADAEFQERLQEDTSFGGNLGRAVFQAKKRVLEPLGLVEEAAKTAPGKKRPVEPSPQRSPDSSAGIGKKGQQPAKKRLNFGQTGDSESVPDPQPIGEPPAGPSGLGSGTMAAGGGAPMADNNEGADGVGSSSGNWHCDSTWLGDRVITTSTRTWALPTYNNHLYKQISNGTSGGSTNDNTYFGYSTPWGYFDFNRFHCHFSPRDWQRLINNNWGFRPKRLSFKLFNIQVKEVTQNEGTETIANNLTSTIQVFTDSEYQLPYVLGSAHQGCLPPFPADVFMIPQYGYLTLNNGSQAVGRSSFYCLEYFPSQMLRTGNNFEFSYTFEDVPFHSSCAHSQSSDRLMNPLIDQYLYYLSRTRSTGGTQGTQQLLFSQAGPANMSAQAKNWLPGPCYRQQRVSTTLSQNNNSNFAWTGATKYHLNGRDSLVNPGVAMATHKDDEERFFPSSGVLMFGKQGAGRDNVDYSSVMLTSEEEIKTTNPVATEQYGVVADNLQQTNTGPIVGNVNSQGALPGMVWQNRDVYLQGPIWAKIPHTDGNFHPSPLMGGFGLKHPPPQILIKNTPVPADPPTTFSQAKLASFITQYSTGQVSVEIEWELQKENSKRWNPEIQYTSNYYKSTNVDFAVNTEGTYSEPRPIGTRYLTRNL

SEQ ID NO: 315 - DNA, 2217 bp, Adeno-associated virus
atggctgctgacggttatcttccagattggctcgaggacaacctctctgagggcattcgcgagtggtgggacctgaaacctggagcccccaagcccaaggccaaccagcagaagcaggacgacggccggggtctggtgcttcttggctacaagtacctcggacccttcaacggactcgacaagggggagcccgtcaatgcggcggacgcagcggccctcgagcacgacaaggcctacgaccagcagctcaaagcgggtgacaatccgtacctgcggtataaccacgccgacgccgagtttcaggagcgtctgcaagaagatacgtcttttgggggcaacctcgggcgagcagtcttccaggccaagaagcgggttctcgaacctctcggtctggttgaggaagctgctaagacggctcctggaaagaagagaccggtagaaccgtcacctcagcgttcccccgactcctccacgggcatcggcaagaaaggccagcagcccgctaaaaagagactgaactttggtcagactggcgactcagagtcagtccccgaccctcaaccaatcggagaaccaccagcaggcccctctggtctgggatctggtacaatggctgcaggcggtggcgctccaatggcagacaataacgaaggcgccgacggagtgggtagttcctcaggaaattggcattgcgattccacatggctgggcgacagagtcatcaccaccagcacccgaacctgggccctgcccacctacaacaaccacctctacaagcaaatatccaatgggacatcgggaggaagcaccaacgacaacacctacttcggctacagcaccccctgggggtattttgacttcaacagattccactgccacttctcaccacgtgactggcagcgactcatcaacaacaactggggattccggccaaaaagactcagcttcaagctcttcaacatccaggtcaaggaggtcacgcagaatgaaggcaccaagaccatcgccaataaccttaccagcacgattcaggtatttacggactcggaataccagctgccgtacgtcctcggctccgcgcaccagggctgcctgcctccgttcccggcggacgtcttcatgattccccagtacggctaccttacactgaacaatggaagtcaagccgtaggccgttcctccttctactgcctggaatattttccatctcaaatgctgcgaactggaaacaattttgaattcagctacaccttcgaggacgtgcctttccacagcggctacgcacacagccagagcttggaccgactgatgaatcctctcatcgaccagtacctgtactacttatccagaactcagtccacaggaggaactcaaggtacccagcaattgttattttctcaagctgggcctgcaaacatgtcggctcaggctaagaactggctacctggaccttgctaccggcagcagcgagtctctacgacactgtcgcaaaacaacaacagcaactttgcttggactggtgccaccaaatatcacctgaacggaagagactctttggtaaatcccggtgtcgccatggcaacccacaaggacgacgaggaacgcttcttcccgtcgagtggagtcctgatgtttggaaaacagggtgctggaagagacaatgtggactacagcagcgttatgctaaccagcgaagaagaaattaaaaccactaaccctgtagccacagaacaatacggtgtggtggctgacaacttgcagcaaaccaatacagggcctattgtgggaaatgtcaacagccaaggagccttacctggcatggtctggcagaaccgagacgtgtacctgcagggtcccatctgggccaagattcctcacacggacggcaacttccacccttcaccgctaatgggaggatttggactgaagcacccacctcctcagatcctgatcaagaacacgccggtacctgcggatcctccaacgacgttcagccaggcgaaattggcttccttcattacgcagtacagcaccggacaggtcagcgtggaaatcgagtgggagctgcagaaggagaacagcaaacgctggaacccagagattcagtacacttcaaactactacaaatctacaaatgtggactttgctgtcaatacagagggaacttattctgagcctcgccccattggtactcgttacctcacccgtaatctgtaa

SEQ ID NO: 316 - protein, 738 aa, Adeno-associated virus
MAADGYLPDWLEDNLSEGIREWWDLKPGAPKPKANQQKQDDGRGLVLLGYKYLGPFNGLDKGEPVNAADAAALEHDKAYDQQLKAGDNPYLRYNHADAEFQERLQEDTSFGGNLGRAVFQAKKRVLEPLGLVEEAAKTAPGKKRPVEPSPQRSPDSSTGIGKKGQQPAKKRLNFGQTGDSESVPDPQPIGEPPAGPSGLGSGTMAAGGGAPMADNNEGADGVGSSSGNWHCDSTWLGDRVITTSTRTWALPTYNNHLYKQISNGTSGGSTNDNTYFGYSTPWGYFDFNRFHCHFSPRDWQRLINNNWGFRPKRLSFKLFNIQVKEVTQNEGTKTIANNLTSTIQVFTDSEYQLPYVLGSAHQGCLPPFPADVFMIPQYGYLTLNNGSQAVGRSSFYCLEYFPSQMLRTGNNFEFSYTFEDVPFHSGYAHSQSLDRLMNPLIDQYLYYLSRTQSTGGTQGTQQLLFSQAGPANMSAQAKNWLPGPCYRQQRVSTTLSQNNNSNFAWTGATKYHLNGRDSLVNPGVAMATHKDDEERFFPSSGVLMFGKQGAGRDNVDYSSVMLTSEEEIKTTNPVATEQYGVVADNLQQTNTGPIVGNVNSQGALPGMVWQNRDVYLQGPIWAKIPHTDGNFHPSPLMGGFGLKHPPPQILIKNTPVPADPPTTFSQAKLASFITQYSTGQVSVEIEWELQKENSKRWNPEIQYTSNYYKSTNVDFAVNTEGTYSEPRPIGTRYLTRNL

SEQ ID NO: 317 - protein, 735 aa, Adeno-associated virus
MAADGYLPDWLEDTLSEGIRQWWKLKPGPPPPKPAERHKDDSRGLVLPGYKYLGPFNGLDKGEPVNEADAAALEHDKAYDRQLDSGDNPYLKYNHADAEFQERLKEDTSFGGNLGRAVFQAKKRVLEPLGLVEPPVKTAPGKKRPVEHSPAEPDSSSGTGKAGQQPARKRLNFGQTGDADSVPDPQPLGQPPAAPSGLGSTTMATGSGAPMADNNEGADGVGNSSGNWHCDSQWLGDRVITTSTRTWALPTYNNHLYKQISSQSGASNDNHYFGYSTPWGYFDFNRFHCHFSPRDWQRLINNNWGFRPKRLNFKLFNIQVKEVTQNDGTTTIANNLTSTVQVFTDSEYQLPYVLGSAHQGCLPPFPADVFMVPQYGYLTLNNGSQAVGRSSFYCLEYFPSQMLRTGNNFQFSYTFEDVPFHSSYAHSQSLDRLMNPLIDQYLYYLNKTQSNSGTLQQSRLLFSQAGPTSMSLQAKNWLPGPCYRQQRLSKQANDNNNSNFPWTAATKYHLNGRDSLVNPGPAMASHKDDEEKFFPMHGTLIFGKQGTNANDADLDNVMITDEEEIRTTNPVATEQYGYVSNNLQNSNTGPTTGTVNHQGALPGMVWQDRDVYLQGPIWAKIPHTDGHFHPSPLMGGFGLKHPPPQIMIKNTPVPANPPTNFSSAKFASFITQYSTGQVSVEIEWELQKENSKRWNPEIQYTSNYNKSVNVDFTVDTNGVYSEPRPIGTRYLTRNL

SEQ ID NO: 318 - protein, 735 aa, Adeno-associated virus
MAADGYLPDWLEDTLSEGIRQWWKLKPGPPPPKPAERHKDDSRGLVLPGYKYLGPFNGLDKGEPVNEADAAALEHDKAYDRQLDSGDNPYLKYNHADAEFQERLKEDTSFGGNLGRAVFQAKKRVLEPLGLVEGPVKTAPGKKRPVEHSPAEPDSSSGTGKAGQQPARKRLNFGQTGDADSVPDPQPLGQPPAAPSGLGSTTMATGSGAPMADNNEGADGVGNSSGNWHCDSQWLGDRVITTSTRTWALPTYNNHLYKQISSQSGASNDNHYFGYSTPWGYFDFNRFHCHFSPRDWQRLINNNWGFRPKRLNFKLFNIQVKEVTQNDGTTTIANNLTSTVQVFTDSEYQLPYVLGSAHQGCLPPFPADVFMVPQYGYLTLNNGSQAVGRSSFYCLEYFPSQMLRTGNNFQFSYTFEDVPFHSSYAHSQSLDRLMNPLIDQYLYYLNKTQSNSGTLQQSRLLFSQAGPTSMSLQAKNWLPGPCYRQQRLSKQANDNNNSNFPWTAATKYHLNGRDSLVNPGPAMASHKDDEEKFFPMHGTLIFGKQGTNANDADLDNVMITDEEEIRTTNPVATEQYGYVSNNLQNSNTGPTTGTVNHQGALPGMVWQDRDVYLQGPIWAKIPHTDGHFHPSPLMGGFGLKHPPPQIMIKNTPVPANPPTNFSSAKFASFITQYSTGQVSVEIEWELQKENSKRWNPEIQYTSNYNKSVNVDFTVDTNGVYSEPRPIGTRYLTRNL

SEQ ID NO: 319 - DNA, 2208 bp, Adeno-associated virus
atggctgccgatggttatcttccagattggctcgaggacactctctctgaaggaataagacagtggtggaagctcaaacctggcccaccaccaccaaagcccgcagagcggcataaggacgacagcaggggtcttgtgcttcctgggtacaagtacctcggacccttcaacggactcgacaagggggagccggtcaacgaggcagacgccgcggccctcgagcacgacaaggcctacgaccggcagctcgacagcggagacaacccgtacctcaagtacaaccacgccgacgcggagtttcaggagcgtcttaaagaagatacgtcttttgggggcaacctcggacgagcagtcttccaggcgaaaaagagggttcttgaacctctgggcctggttgagggacctgttaagacggctccgggaaaaaagaggccggtagagcactctcctgcggagccagactcctcctcgggaaccggaaaagcgggccagcagcctgcaagaaaaagattgaattttggtcagactggagacgcagactccgtacctgacccccagcctctcggacagccaccagcagccccctctggtttgggatctactacaatggctacaggcagtggcgcaccaatggcagacaataacgagggtgccgatggagtgggtaattcctcaggaaattggcattgcgattcccaatggctgggcgacagagtcatcaccaccagcacccgaacctgggccctgcccacctacaacaaccacctctacaagcaaatctcaagccaatcaggagcctcaaacgacaaccactactttggctacagcaccccttgggggtattttgacttcaacagattccactgccacttttcaccacgtgactggcaaagactcatcaacaacaactggggattccgacccaagagactcaacttcaagctctttaacattcaagtcaaagaggtcacgcagaatgacggtacgacgacgattgccaataaccttaccagcacggttcaggtgtttactgactcggagtaccagctcccgtacgtcctcgggtcggcgcatcaaggatgcctcccgccgtttccagcggacgtcttcatggtcccacagtatggatacctcaccctgaacaacgggagtcaggcggtaggacgctcttccttttactgcctggagtactttccttctcagatgcttcgtactggaaacaactttcagttcagctacacctttgaagacgttcctttccacagcagctacgctcacagccagagtctggatcggctgatgaatcctctgatcgaccagtacctgtattatctgaacaaaacacaatcaaatagtggaactcttcagcagtctcggctactgtttagtcaagctggacccaccagcatgtctcttcaagctaaaaactggctacctggaccttgctacagacagcagcgtctgtcaaagcaggcaaacgacaacaacaacagcaactttccctggactgcggctacaaagtatcacctaaatggccgggactcgttggttaatccaggaccagctatggccagtcacaaagacgatgaagaaaagtttttccccatgcatggaaccctgatatttggtaaacaaggaacaaatgctaacgacgcggatttggacaatgtcatgattacagatgaagaagaaatccgcaccaccaatcccgtggctacggagcagtacggatatgtgtcaaataatttgcaaaactcaaatactggtccaactactggaactgtcaatcaccaaggagcgttacctggcatggtgtggcaggatcgagacgtgtacctgcagggacccatttgggccaagattcctcacaccgatggacactttcatccttctccactgatgggaggttttgggctcaaacacccgcctcctcagatcatgatcaaaaacactcccgttccagccaatcctcccacaaacttcagttctgccaagtttgcttctttcatcacacagtattccacggggcaggtcagcgtggagatcgagtgggagctgcagaaagagaacagcaaacgctggaatcccgaaattcagtacacttccaactacaacaaatctgttaatgtggactttactgtggacactaatggcgtgtattcagagcctcgccccattggcaccagatacctgactcgtaatctgtaa

SEQ ID NO: 320 - DNA, 2211 bp, Adeno-associated virus; identical to SEQ ID NO: 1

SEQ ID NO: 321 - DNA, 2208 bp, Adeno-associated virus
atggctgccgatggttatcttccagattggctcgaggacactctctctgaaggaacaagacagtggtggaagctcaaacctggcccaccaccaccaaagcccgcagagcggcataaggacgacagcaggggtcttgtgcttcctgggtacaagtacctcggacccttcaacggactcgacaagggggagccggtcaacgaggcagacgccgcggccctcgagcacgacaaggcctacgaccggcagctcgacagcggagacaacccgtacctcaagtacaaccacgccgacgcggagtttcaggagcgtcttaaagaagatacgtcttttgggggcaacctcggacgagcagtcttccaggcgaaaaagagggttcttgaacctctgggcctggttgaggaacctgttaagacggctccgggaaaaaagaggccggtagagcactctcctgcggagccagactcctcctcgggaaccggaaaagcgggccagcagcctgcaagaaaaagattgaattttggtcagactggagacgcagactccgtacctgacccccagcctctcggacagccaccagcagccccctctggtttgggatctactacaatggctacaggcagtggcgcaccaatggcagacaataacgagggtgccgatggagtgggtaattcctcaggaaattggcattgcgattcccaatggctgggcgacagagtcatcaccaccagcacccgaacctgggccctgcccacctacaacaaccacctctacaagcaaatctcaagccaatcaggagcctcaaacgacaaccactactttggctacagcaccccttgggggtattttgacttcaacagattccactgccacttttcaccacgtgactggcaaagactcatcaacaacaactggggattccgacccaagagactcaacttcaagctctttaacattcaagtcaaagaggtcacgcagaatgacggtacgacgacgattgccaataaccttaccagcacggttcaggtgtttactgactcggagtaccagctcccgtacgtcctcgggtcggcgcatcaaggatgcctcccgccgtttccagcggacgtcttcatggtcccacagtatggatacctcaccctgaacaacgggagtcaggcggtaggacgctcttccttttactgcctggagtactttccttctcagatgcttcgtactggaaacaactttcagttcagctacacctttgaagacgttcctttccacagcagctacgctcacagccagagtctggatcggctgatgaatcctctgatcgaccagtacctgtattatctgaacaaaacacaatcaaatagtggaactcttcagcagtctcggctactgtttagtcaagctggacccaccagcatgtctcttcaagctaaaaactggctacctggaccttgctacagacagcagcgtctgtcaaagcaggcaaacgacaacaacaacagcaactttccctggactgcggctacaaagtaccacctaaatggccgggactcgttggttaatccaggaccagctatggccagtcacaaagacgatgaagaaaagtttttccccatgcatggaaccctgatatttggtaaacaaggaacaaatgctaacgacgcggatttggacaatgtcatgattacagatgaagaagaaatccgcaccaccaatcccgtggctacggagcagtacggatatgtgtcaaataatttgcaaaactcaaatactggtccaactactggaactgtcaatcaccaaggagcgttacctggcatggtgtggcaggatcgagacgtgtacctgcagggacccatttgggccaagattcctcacaccgatggacactttcatccttctccactgatgggaggttttgggctcaaacacccgcctcctcagatcatgatcaaaaacactcccgttccagccaatcctcccacaaacttcagttctgccaagtttgcttctttcatcacacagtattccacggggcaggtcagcgtggagatcgagtgggagctgcagaaagagaacagcaaacgctggaatcccgaaattcagtacacttccaactacaacaaatctgttaatgtggactttactgtggacactaatggcgtgtattcagagcctcgccccattggcaccagatacctgactcgtaatctgtaa

SEQ ID NO: 322 - DNA, 2217 bp, Adeno-associated virus
atggctgctgacggttatcttccagattggctcgaggacaacctctctgagggcattcgcgagtggtgggacctgaaacctggagcccccaagcccaaggccaaccagcagaagcaggacgacggccggggtctggtgcttcctggctacaagtacctcggacccttcaacggactcgacaagggggagcccgtcaacgcggcggacgcagcggccctcgagcacgacaaggcctacgaccagcagctcaaagcgggtgacaatccgtacctgcggtataaccacgccgacgccgagtttcaggagcgtctgcaagaagatacgtcttttgggggcaacctcgggcgagcagtcttccaggccaagaagcgggttctcgaacctctcggtctggttgaggaagctgctaagacggctcctggaaagaagagaccggtagaaccgtcacctcagcgttcccccgactcctccacgggcatcggcaagaaaggccagcagcccgctaaaaagagactgaactttggtcagactggcgactcagagtcagtccccgaccctcaaccaatcggagaaccacctgcaggcccctctggtctgggatctggtacaatggctgcaggcggtggcgctccaatggcagacaataacgaaggcgccgacggagtgggtagttcctcaggaaattggcattgcgattccacatggctgggcgacagagtcatcaccaccagcacccgaacctgggccctgcccacctacaacaaccacctctacaagcaaatatccaatgggacatcgggagggagcaccaacgacaacacctacttcggctacagcaccccctgggggtattttgacttcaacagattccactgccacttctcaccacgtgactggcagcgactcatcaacaacaactggggattccggccaaaaagactcagcttcaagctcttcaacatccaggtcaaggaggtcacgcagaatgaaggcaccaagaccatcgccaataaccttaccagcacgattcaggtatttacggactcggaataccagctgccgtacgtcctcggctccgcgcaccagggctgcctgcctccgttcccggcggacgtcttcatgattccccagtacggctaccttacactgaacaatggaagtcaagccgtaggccgttcctccttctactgcctggaatattttccatctcaaatgctgcgaactggaaacaattttgaattcagctacaccttcgaggacgtgcctttccacagcagctacgcacacagccagagcttggaccgactgatgaatcctctcatcgaccagtacctgtactacttatccagaactcagtccacaggaggaactcaaggtacccagcaattgttattttctcaagctgggcctgcaaacatgtcggctcaggctaagaactggctacctggaccttgctaccggcagcagcgagtctctacgacactgtcgcaaaacaacaacagcaactttgcttggactggtgccaccaaatatcacctgaacggaagagactctttggtaaatcccggtgtcgccatggcaacccacaaggacgacgaggaacgcttcttcccgtcgagtggagtcctgatgtttggaaaacagggtgctggaagagacaatgtggactacagcagcgttatgctaaccagcgaagaagaaattaaaaccactaaccctgtagccacagaacaatacggtgtggtggctgacaacttgcagcaaaccaatacagggcctattgtgggaaatgtcaacagccaaggagccttacctggcatggtctggcagaaccgagacgtgtacctgcagggtcccatctgggccaagattcctcacacggacggcaactgccacccttcaccgctaatgggaggatttggactgaagcacccacctcctcagatcctgatcaagaacacgccggtacctgcggatcctccaacaacgttcagccaggcgaaattggcttccttcattacgcagtacagcaccggacaggtcagcgtggaaatcgagtgggagctgcagaaggagaacagcaaacgctggaacccagagattcagtacacttcaaactactacaaatctacaaatgtggactttgctgtcaatacagagggaacttattctgagcctcgccccattggtactcgttacctcacccgtaatctgtaa

SEQ ID NO: 323 - protein, 735 aa, Adeno-associated virus
MAADGYLPDWLEDTLSEGTRQWWKLKPGPPPPKPAERHKDDSRGLVLPGYKYLGPFNGLDKGEPVNEADAAALEHDKAYDRQLDSGDNPYLKYNHADAEFQERLKEDTSFGGNLGRAVFQAKKRVLEPLGLVEEPVKTAPGKKRPVEHSPAEPDSSSGTGKAGQQPARKRLNFGQTGDADSVPDPQPLGQPPAAPSGLGSTTMATGSGAPMADNNEGADGVGNSSGNWHCDSQWLGDRVITTSTRTWALPTYNNHLYKQISSQSGASNDNHYFGYSTPWGYFDFNRFHCHFSPRDWQRLINNNWGFRPKRLNFKLFNIQVKEVTQNDGTTTIANNLTSTVQVFTDSEYQLPYVLGSAHQGCLPPFPADVFMVPQYGYLTLNNGSQAVGRSSFYCLEYFPSQMLRTGNNFQFSYTFEDVPFHSSYAHSQSLDRLMNPLIDQYLYYLNKTQSNSGTLQQSRLLFSQAGPTSMSLQAKNWLPGPCYRQQRLSKQANDNNNSNFPWTAATKYHLNGRDSLVNPGPAMASHKDDEEKFFPMHGTLIFGKQGTNANDADLDNVMITDEEEIRTTNPVATEQYGYVSNNLQNSNTGPTTGTVNHQGALPGMVWQDRDVYLQGPIWAKIPHTDGHFHPSPLMGGFGLKHPPPQIMIKNTPVPANPPTNFSSAKFASFITQYSTGQVSVEIEWELQKENSKRWNPEIQYTSNYNKSVNVDFTVDTNGVYSEPRPIGTRYLTRNL

SEQ ID NO: 324 - DNA, 2208 bp, Adeno-associated virus
atggctgccgatggttatcttccagattggctcgaggacactctctctgaaggaataagacagtggtggaagctcaaacctggcccaccaccaccaaagcccgcagagcggcatcaggacaacagcaggggtcttgtgcttcctgggtacaagtacctcggaccctccaacggactcgacaaaggagagccggtcaacgaggcagacgccgcggccctcgagcacgacaaggcctacgaccggcagctcgacagcggagacaacccgtacctcaagtacaaccacgccgacgcggagtttcaggagcgtcttaaagaagatacgtcttttgggggcaacctcggacgagcagtcttccaggcgaaaaagagggttcttgaacctctgggcctggttgaggaacctgttaagacggctccgggaaaaaagaggccggtagagcactctcctgtggagccagactcctcctcgggaaccggaaaagcgggccatcagcctgcgagaaagagattgaattttggtcagactggagacgcagactccgtacctgacccccagcctctcggacagccaccagcagcccccacaagtttgggatctactacaatggctacaggcagtggcgcaccaatggcagacaataacgagggtgccgatggagtgggtaattcctcaggaaattggcattgcgattcccaatggctgggcgacagagtcatcaccaccagcacccgaacctgggccctgcccacctacaacaaccacctctacaagcaaatctccagccaatcaggagcctcgaacgacaaccactactttggctgcagcaccccctgggggtattttgacttcaacagattccactgtcacttctccccacgtgattggcaaagactcatcaacaacaactggggattccgacccaagagactcaacttcaagctctttaacattcaagtcaaagaggtcacgcagaatgacggtacgacgacgattgccaataaccttaccagcacggttcaggtgtttactgactcggagtacccgctcccgtacgtcctcggctcggcgcatcaaggatgcctcccgccgtttccagcggacgtcttcatggtcccacagtatggatacctcaccctgaacaacgggagtcaggcggtaggacgctcttccttttactgcctggagtactttccttctcagatgctgcgtaccggaaacaactttaccttcagctacacctttgaggacgttcctttccacagcagctacgctcacagccagagtttggaccggctgatgaatcctctgatcgaccagtatctatattatctgaacaggacacaatcaaatagtggaactcttcagcagtctaggctactgtttagccaagctggacccaccagcatgtctcttcaagctaaaaactggctgcctggaccttgctacagacagcagcgtctttcaaagcaggcaaacgacaacaacaacagcaactttccctggactgcggctacaaagtatcatctaaatggccgggactcgttggttaatccaggaccagctatggccagccacaaagacgatgaagaaaagtttttccccatgcatggaaccctgatatttggtaaacaaggaacaaatgctaacgacgcggatttggagcatgttatgattacagatgaagaagaaatcaggaccaccaatcctgtggctacagagcagtacggaaacgtgtcaaataatttgcaaaactcaaatactggtccaactacagaaaatgtcaatcaccagggagcgttacctggtatggtgtggcaggatcgagacgtgtacctgcagggacccatttgggccaagattcctcacaccgacggacactttcacccttctccactgatgggaggttttggactcaaacacccgcctcctcaaatcatgatcaaaaacactcccgttccagccaatcctcccacaaacttcagttctgccaagtttgcttctttcatcacacagtattccacgggccaggtcagcgtggagattgagtgggagctgcagaaggagaacagcaaacgctggaaccccgagatccagtatacttccaactacaacaaatctgttaatgtggactttactgtggacactaatggtgtgtattcagagccttgccccattggcaccagatacctgactcgtaatctgtaa

SEQ ID NO: 325 - protein, 735 aa, Adeno-associated virus
MAADGYLPDWLEDTLSEGIRQWWKLKPGPPPPKPAERHQDNSRGLVLPGYKYLGPSNGLDKGEPVNEADAAALEHDKAYDRQLDSGDNPYLKYNHADAEFQERLKEDTSFGGNLGRAVFQAKKRVLEPLGLVEEPVKTAPGKKRPVEHSPVEPDSSSGTGKAGHQPARKRLNFGQTGDADSVPDPQPLGQPPAAPTSLGSTTMATGSGAPMADNNEGADGVGNSSGNWHCDSQWLGDRVITTSTRTWALPTYNNHLYKQISSQSGASNDNHYFGCSTPWGYFDFNRFHCHFSPRDWQRLINNNWGFRPKRLNFKLFNIQVKEVTQNDGTTTIANNLTSTVQVFTDSEYPLPYVLGSAHQGCLPPFPADVFMVPQYGYLTLNNGSQAVGRSSFYCLEYFPSQMLRTGNNFTFSYTFEDVPFHSSYAHSQSLDRLMNPLIDQYLYYLNRTQSNSGTLQQSRLLFSQAGPTSMSLQAKNWLPGPCYRQQRLSKQANDNNNSNFPWTAATKYHLNGRDSLVNPGPAMASHKDDEEKFFPMHGTLIFGKQGTNANDADLEHVMITDEEEIRTTNPVATEQYGNVSNNLQNSNTGPTTENVNHQGALPGMVWQDRDVYLQGPIWAKIPHTDGHFHPSPLMGGFGLKHPPPQIMIKNTPVPANPPTNFSSAKFASFITQYSTGQVSVEIEWELQKENSKRWNPEIQYTSNYNKSVNVDFTVDTNGVYSEPCPIGTRYLTRNL

SEQ ID NO: 326 - DNA, 2214 bp, Artificial Sequence
  Description of Artificial Sequence: Synthetic polynucleotide
atggctgccgatggttatcttccagattggctcgaggacaaccttagtgaaggaattcgcgagtggtgggctttgaaacctggagcccctcaacccaaggcaaatcaacaacatcaagacaacgctcgaggtcttgtgcttccgggttacaaataccttggacccggcaacggactcgacaagggggagccggtcaacgcagcagacgcggcggccctcgagcacgacaaggcctacgaccagcagctgcaggcgggtgacaatccgtacctgcggtataaccacgccgacgccgagtttcaggagcgtctgcaagaagatacgtcttttgggggcaaccttggcagagcagtcttccaggccaaaaagaggatccttgagcctcttggtctggttgaggaagcagctaaaacggctcctggaaagaagaggcctgtagatcagtctcctcaggaaccggactcatcatctggtgttggcaaatcgggcaaacagcctgccagaaaaagactaaatttcggtcagactggcgactcagagtcagtcccagaccctcaacctctcggagaaccaccagcagcccccacaagtttgggatctaatacaatggcttcaggcggtggcgcaccaatggcagacaataacgagggtgccgatggggtgggtagttcctcgggaaattggcattgcgattcccaatggctgggggacagagtcatcaccaccagcacccgaacctgggccctgcccacctacaacaatcacctctacaagcaaatctccaacgggacatcgggaggagccaccaacgacaacacctacttcggctacagcaccccctgggggtattttgactttaacagattccactgccacttttcaccacgtgactggcagcgactcatcaacaacaactggggattccggcccaagagactcagcttcaagctcttcaacatccaggtcaaggaggtcacgcagaatgaaggcaccaagaccatcgccaataacctcaccagcaccatccaggtgtttacggactcggagtaccagctgccgtacgttctcggctctgcgcaccagggctgcctccctccgttcccggcggacgtgttcatgattccgcaatacggctacctgacgctcaacaatggcagccaagccgtgggacgttcatccttttactgcctggaatatttcccttctcagatgctgagaacgggcaacaactttaccttcagctacacctttgaggaagtgcctttccacagcagctacgcgcacagccagagcttggaccggctgatgaatcctctgattgaccagtacctgtactacttgtctcggactcaaacaacaggaggcacggcaaatacgcagactctgggcttcagccaaggtgggcctaatacaatggccaatcaggcaaagaactggctgccaggaccctgttaccgccaacaacgcgtctcaacgacaaccgggcaaaacaacaatagcaactttgcctggactgctgggaccaaataccatctgaatggaagaaattcattggctaatcctggcatcgctatggcaacacacaaagacgacgaggagcgtttttttcccagtaacgggatcctgatttttggcaaacaaaatgctgccagagacaatgcggattacagcgatgtcatgctcaccagcgaggaagaaatcaaaaccactaaccctgtggctacagaggaatacggtatcgtggcagataacttgcagcagcaaaacacggctcctcaaattggaactgtcaacagccagggggccttacccggtatggtctggcagaaccgggacgtgtacctgcagggtcccatctgggccaagattcctcacacggacggcaacttccacccgtctccgctgatgggcggctttggcctgaaacatcctccgcctcagatcctgatcaagaacacgcctgtacctgcggatcctccgaccaccttcaaccagtcaaagctgaactctttcatcacgcaatacagcaccggacaggtcagcgtggagatcgagtgggagctgcagaaggaaaacagcaagcgctggaacccggagatccagtacacttccaactattacaagtctaataatgttgaatttgctgttaatactgaaggtgtatatagtgaaccccgccccattggcaccagatacctgactcgtaatctgtaa

SEQ ID NO: 327 - protein, 737 aa, Artificial Sequence
  Description of Artificial Sequence: Synthetic polypeptide
MAADGYLPDWLEDNLSEGIREWWALKPGAPQPKANQQHQDNARGLVLPGYKYLGPGNGLDKGEPVNAADAAALEHDKAYDQQLQAGDNPYLRYNHADAEFQERLQEDTSFGGNLGRAVFQAKKRILEPLGLVEEAAKTAPGKKRPVDQSPQEPDSSSGVGKSGKQPARKRLNFGQTGDSESVPDPQPLGEPPAAPTSLGSNTMASGGGAPMADNNEGADGVGSSSGNWHCDSQWLGDRVITTSTRTWALPTYNNHLYKQISNGTSGGATNDNTYFGYSTPWGYFDFNRFHCHFSPRDWQRLINNNWGFRPKRLSFKLFNIQVKEVTQNEGTKTIANNLTSTIQVFTDSEYQLPYVLGSAHQGCLPPFPADVFMIPQYGYLTLNNGSQAVGRSSFYCLEYFPSQMLRTGNNFTFSYTFEEVPFHSSYAHSQSLDRLMNPLIDQYLYYLSRTQTTGGTANTQTLGFSQGGPNTMANQAKNWLPGPCYRQQRVSTTTGQNNNSNFAWTAGTKYHLNGRNSLANPGIAMATHKDDEERFFPSNGILIFGKQNAARDNADYSDVMLTSEEEIKTTNPVATEEYGIVADNLQQQNTAPQIGTVNSQGALPGMVWQNRDVYLQGPIWAKIPHTDGNFHPSPLMGGFGLKHPPPQILIKNTPVPADPPTTFNQSKLNSFITQYSTGQVSVEIEWELQKENSKRWNPEIQYTSNYYKSNNVEFAVNTEGVYSEPRPIGTRYLTRNL

SEQ ID NO: 328 - DNA, 2211 bp, Artificial Sequence
  Description of Artificial Sequence: Synthetic polynucleotide
atggctgccgatggttatcttccagattggctcgaggacaacctctctgagggcattcgcgagtggtgggacttgaaacctggagccccgaagcccaaagccaaccagcaaaagcaggacgacggccggggtctggtgcttcctggctacaagtacctcggacccttcaacggactcgacaagggggagcccgtcaacgcggcggacgcagcggccctcgagcacgacaaggcctacgaccagcagctcaaagcgggtgacaatccgtacctgcggtataaccacgccgacgccgagtttcaggagcgtctgcaagaagatacgtcttttgggggcaacctcgggcgagcagtcttccaggccaagaagcgggttctcgaacctctcggtctggttgaggaaggcgctaagacggctcctggaaagaaacgtccggtagagcagtcgccacaagagccagactcctcctcgggcatcggcaagacaggccagcagcccgctaaaaagagactcaattttggtcagactggcgactcagagtcagtccccgacccacaacctctcggagaacctccagcaacccccgctgctgtgggacctactacaatggcttcaggcggtggcgcaccaatggcagacaataacgaaggcgccgacggagtgggtaatgcctcaggaaattggcattgcgattccacatggctgggcgacagagtcatcaccaccagcacccgaacatgggccttgcccacctataacaaccacctctacaagcaaatctccagtgcttcaacgggggccagcaacgacaaccactacttcggctacagcaccccctgggggtattttgatttcaacagattccactgccatttctcaccacgtgactggcagcgactcatcaacaacaattggggattccggcccaagagactcaacttcaagctcttcaacatccaagtcaaggaggtcacgacgaatgatggcgtcacgaccatcgctaataaccttaccagcacggttcaagtcttctcggactcggagtaccagctgccgtacgttctcggctctgcccaccagggctgcctgcctccgttcccggcggacgtgttcatgattccccagtacggctacctaacactcaacaacggtagtcaggccgtgggacgctcctccttctactgcctggaatactttccttcgcagatgctgagaaccggcaacaacttccagtttacttacaccttcgaggacgtgcctttccacagcagctacgcccacagccagagcttggaccggctgatgaatcctctgattgaccagtacctgtactacttgtctcggactcaaacaacaggaggcacggcaaatacgcagactctgggcttcagccaaggtgggcctaatacaatggccaatcaggcaaagaactggctgccaggaccctgttaccgccaacaacgcgtctcaacgacaaccgggcaaaacaacaatagcaattttacctggactggtgcttcaaaatataacctcaatgggcgtgaatccatcatcaaccctggcactgctatggcctcacacaaagacgacgaagacaagttctttcccatgagcggtgtcatgatttttggaaaagagagcgccggagcttcaaacactgcattggacaatgtcatgattacagacgaagaggaaattaaagccactaaccctgtggccaccgaaagatttgggaccgtggcagtcaatttccagagcagcagcacagaccctgcgaccggagatgtgcatgctatgggagcattacctggcatggtgtggcaagatagagacgtgtacctgcagggtcccatttgggccaaaattcctcacacagatggacactttcacccgtctcctcttatgggcggctttggactcaagaacccgcctcctcagatcctcatcaaaaacacgcctgttcctgcgaatcctccggcggagttttcagctacaaagtttgcttcattcatcacccaatactccacaggacaagtgagtgtggaaattgaatgggagctgcagaaagaaaacagcaagcgctggaatcccgaagtgcagtacacatccaattatgcaaaatctgccaacgttgattttactgtggacaacaatggactttatactgagcctcgccccattggcacccgttacctcacccgtcccctgtaa

SEQ ID NO: 329 - protein, 736 aa, Artificial Sequence
  Description of Artificial Sequence: Synthetic polypeptide
MAADGYLPDWLEDNLSEGIREWWDLKPGAPKPKANQQKQDDGRGLVLPGYKYLGPFNGLDKGEPVNAADAAALEHDKAYDQQLKAGDNPYLRYNHADAEFQERLQEDTSFGGNLGRAVFQAKKRVLEPLGLVEEGAKTAPGKKRPVEQSPQEPDSSSGIGKTGQQPAKKRLNFGQTGDSESVPDPQPLGEPPATPAAVGPTTMASGGGAPMADNNEGADGVGNASGNWHCDSTWLGDRVITTSTRTWALPTYNNHLYKQISSASTGASNDNHYFGYSTPWGYFDFNRFHCHFSPRDWQRLINNNWGFRPKRLNFKLFNIQVKEVTTNDGVTTIANNLTSTVQVFSDSEYQLPYVLGSAHQGCLPPFPADVFMIPQYGYLTLNNGSQAVGRSSFYCLEYFPSQMLRTGNNFQFTYTFEDVPFHSSYAHSQSLDRLMNPLIDQYLYYLSRTQTTGGTANTQTLGFSQGGPNTMANQAKNWLPGPCYRQQRVSTTTGQNNNSNFTWTGASKYNLNGRESIINPGTAMASHKDDEDKFFPMSGVMIFGKESAGASNTALDNVMITDEEEIKATNPVATERFGTVAVNFQSSSTDPATGDVHAMGALPGMVWQDRDVYLQGPIWAKIPHTDGHFHPSPLMGGFGLKNPPPQILIKNTPVPANPPAEFSATKFASFITQYSTGQVSVEIEWELQKENSKRWNPEVQYTSNYAKSANVDFTVDNNGLYTEPRPIGTRYLTRPL

SEQ ID NO: 330 - DNA, 2211 bp, Artificial Sequence
  Description of Artificial Sequence: Synthetic polynucleotide
atggctgctgacggttatcttccagattggctcgaggacaacctttctgaaggcattcgagagtggtgggcgctgcaacctggagcccctaaacccaaggcaaatcaacaacatcaggacaacgctcggggtcttgtgcttccgggttacaaatacctcggacccggcaacggactcgacaagggggaacccgtcaacgcagcggacgcggcagccctcgagcacgacaaggcctacgaccagcagctcaaggccggtgacaacccctacctcaagtacaaccacgccgacgccgagttccaggagcggctcaaagaagatacgtcttttgggggcaacctcgggcgagcagtcttccaggccaaaaagaggcttcttgaacctcttggtctggttgaggaagcggctaagacggctcctggaaagaagaggcctgtagatcagtctcctcaggaaccggactcatcatctggtgttggcaaatcgggcaaacagcctgccagaaaaagactaaatttcggtcagactggcgactcagagtcagtcccagaccctcaacctctcggagaaccaccagcagcccccacaagtttgggatctaatacaatggcttcaggcggtggcgcaccaatggcagacaataacgagggtgccgatggagtgggtaattcctcaggaaattggcattgcgattcccaatggctgggcgacagagtcatcaccaccagcaccagaacctgggccctgcccacttacaacaaccatctctacaagcaaatctccagccaatcaggagcttcaaacgacaaccactactttggctacagcaccccttgggggtattttgactttaacagattccactgccacttctcaccacgtgactggcagcgactcattaacaacaactggggattccggcccaagaaactcagcttcaagctcttcaacatccaagttaaagaggtcacgcagaacgatggcacgacgactattgccaataaccttaccagcacggttcaagtgtttacggactcggagtatcagctcccgtacgtgctcgggtcggcgcaccaaggctgtctcccgccgtttccagcggacgtcttcatggtccctcagtatggatacctcaccctgaacaacggaagtcaagcggtgggacgctcatccttttactgcctggagtacttcccttcgcagatgctaaggactggaaataacttccaattcagctataccttcgaggatgtaccttttcacagcagctacgctcacagccagagtttggatcgcttgatgaatcctcttattgatcagtatctgtactacctgaacagaacgcaaggaacaacctctggaacaaccaaccaatcacggctgctttttagccaggctgggcctcagtctatgtctttgcaggccagaaattggctacctgggccctgctaccggcaacagagactttcaaagactgctaacgacaacaacaacagtaactttccttggacagcggccagcaaatatcatctcaatggccgcgactcgctggtgaatccaggaccagctatggccagtcacaaggacgatgaagaaaaatttttccctatgcacggcaatctaatatttggcaaagaagggacaacggcaagtaacgcagaattagataatgtaatgattacggatgaagaagagattcgtaccaccaatcctgtggcaacagagcagtatggaactgtggcaaataacttgcagagctcaaatacagctcccacgactagaactgtcaatgatcagggggccttacctggcatggtgtggcaagatcgtgacgtgtaccttcaaggacctatctgggcaaagattcctcacacggatggacactttcatccttctcctctgatgggaggctttggactgaaacatccgcctcctcaaatcatgatcaaaaatactccggtaccggcaaatcctccgacgactttcagcccggccaagtttgcttcatttatcactcagtactccactggacaggtcagcgtggaaattgagtgggagctacagaaagaaaacagcaaacgttggaatccagagattcagtacacttccaactacaacaagtctgttaatgtggactttactgtagacactaatggtgtttatagtgaacctcgccccattggcacccgttaccttacccgtcccctgtaa

SEQ ID NO: 331 - protein, 736 aa, Artificial Sequence
  Description of Artificial Sequence: Synthetic polypeptide
MAADGYLPDWLEDNLSEGIREWWALQPGAPKPKANQQHQDNARGLVLPGYKYLGPGNGLDKGEPVNAADAAALEHDKAYDQQLKAGDNPYLKYNHADAEFQERLKEDTSFGGNLGRAVFQAKKRLLEPLGLVEEAAKTAPGKKRPVDQSPQEPDSSSGVGKSGKQPARKRLNFGQTGDSESVPDPQPLGEPPAAPTSLGSNTMASGGGAPMADNNEGADGVGNSSGNWHCDSQWLGDRVITTSTRTWALPTYNNHLYKQISSQSGASNDNHYFGYSTPWGYFDFNRFHCHFSPRDWQRLINNNWGFRPKKLSFKLFNIQVKEVTQNDGTTTIANNLTSTVQVFTDSEYQLPYVLGSAHQGCLPPFPADVFMVPQYGYLTLNNGSQAVGRSSFYCLEYFPSQMLRTGNNFQFSYTFEDVPFHSSYAHSQSLDRLMNPLIDQYLYYLNRTQGTTSGTTNQSRLLFSQAGPQSMSLQARNWLPGPCYRQQRLSKTANDNNNSNFPWTAASKYHLNGRDSLVNPGPAMASHKDDEEKFFPMHGNLIFGKEGTTASNAELDNVMITDEEEIRTTNPVATEQYGTVANNLQSSNTAPTTRTVNDQGALPGMVWQDRDVYLQGPIWAKIPHTDGHFHPSPLMGGFGLKHPPPQIMIKNTPVPANPPTTFSPAKFASFITQYSTGQVSVEIEWELQKENSKRWNPEIQYTSNYNKSVNVDFTVDTNGVYSEPRPIGTRYLTRPL

SEQ ID NO: 332 - DNA, 2211 bp, Artificial Sequence
  Description of Artificial Sequence: Synthetic polynucleotide
atggctgccgatggttatcttccagattggctcgaggacaaccttagtgaaggaattcgcgagtggtgggctttgaaacctggagcccctcaacccaaggcaaatcaacaacatcaagacaacgctcgaggtcttgtgcttccgggttacaaataccttggacccggcaacggactcgacaagggggagccggtcaacgcagcagacgcggcggccctcgagcacgacaaggcctacgaccagcagctcaaggccggagacaacccgtacctcaagtacaaccacgccgacgccgagttccaggagcggctcaaagaagatacgtcttttgggggcaacctcgggcgagcagtcttccaggccaaaaagaggcttcttgaacctcttggtctggttgaggaagcggctaagacggctcctggaaagaagagaccggtagagccatcaccccagcgttctccagactcctctacgggcatcggcaagaaaggccaacagcccgctaaaaagagactcaattttggtcagactggcgactcagagtcagtccccgacccacaacctctcggagaacctccagcaacccccgctgctgtgggacctactacaatggcttcaggcggtggcgcaccaatggcagacaataacgagggtgccgatggagtgggtaattcctcaggaaattggcattgcgattcccaatggctgggcgacagagtcatcaccaccagcaccagaacctgggccctgcccacttacaacaaccatctctacaagcaaatctccagccaatcaggagcttcaaacgacaaccactactttggctacagcaccccttgggggtattttgactttaacagattccactgccacttttcaccacgtgactggcaaagactcatcaacaacaactggggattccgacccaagagactcaacttcaagctcttcaacatccaagtcaaggaggtcacgacgaatgatggcgtcacgaccatcgctaataaccttaccagcacggttcaagtcttctcggactcggagtaccagttgccgtacgtcctcggctctgcgcaccagggctgcctccctccgttcccggcggacgtgttcatgattccgcagtacggctacctaacgctcaacaatggcagccaagccgtgggacgttcatccttttactgcctggaatatttcccttctcagatgctgagaacgggcaacaactttaccttcagctacacttttgaggacgttcctttccacagcagctacgctcacagccagagtctggaccgtctcatgaatcctctcatcgaccagtacctgtattacttgagcagaacaaacactccaagtggaaccaccacgcagtcaaggcttcagttttctcaggccggagcgagtgacattcgggaccagtctaggaactggcttcctggaccctgttaccgccagcagcgcgtttctaaaacaaaaacagacaacaacaacagcaattttacctggactggtgcttcaaaatataaccttaatgggcgtgaatctataatcaaccctggcactgctatggcctcacacaaagacgacgaagacaagttctttcccatgagcggtgtcatgatttttggaaaagagagcgccggagcttcaaacactgcattggacaatgtcatgattacagacgaagaggaaattaaagccactaaccctgtggccaccgaaagatttgggaccgtggcagtcaatttccagagcagcagcacagaccctgcgaccggagatgtgcatgttatgggagccttacctggaatggtgtggcaagacagagacgtatacctgcagggtcctatttgggccaaaattcctcacacggatggacactttcacccgtctcctcttatgggcggctttggactcaagaacccgcctcctcagatcctcatcaaaaacacgcctgttcctgcgaatcctccggcggagttttcagctacaaagtttgcttcattcatcacccaatactccacaggacaagtgagtgtggaaattgaatgggagctgcagaaagaaaacagcaagcgctggaatcccgaagtgcagtacacatccaattatgcaaaatctgccaacgttgattttactgtggacaacaatggactttatactgagcctcgccccattggcacccgttaccttacccgtcccctgtaa

SEQ ID NO: 333 - protein, 736 aa, Artificial Sequence
  Description of Artificial Sequence: Synthetic polypeptide
MAADGYLPDWLEDNLSEGIREWWALKPGAPQPKANQQHQDNARGLVLPGYKYLGPGNGLDKGEPVNAADAAALEHDKAYDQQLKAGDNPYLKYNHADAEFQERLKEDTSFGGNLGRAVFQAKKRLLEPLGLVEEAAKTAPGKKRPVEPSPQRSPDSSTGIGKKGQQPAKKRLNFGQTGDSESVPDPQPLGEPPATPAAVGPTTMASGGGAPMADNNEGADGVGNSSGNWHCDSQWLGDRVITTSTRTWALPTYNNHLYKQISSQSGASNDNHYFGYSTPWGYFDFNRFHCHFSPRDWQRLINNNWGFRPKRLNFKLFNIQVKEVTTNDGVTTIANNLTSTVQVFSDSEYQLPYVLGSAHQGCLPPFPADVFMIPQYGYLTLNNGSQAVGRSSFYCLEYFPSQMLRTGNNFTFSYTFEDVPFHSSYAHSQSLDRLMNPLIDQYLYYLSRTNTPSGTTTQSRLQFSQAGASDIRDQSRNWLPGPCYRQQRVSKTKTDNNNSNFTWTGASKYNLNGRESIINPGTAMASHKDDEDKFFPMSGVMIFGKESAGASNTALDNVMITDEEEIKATNPVATERFGTVAVNFQSSSTDPATGDVHVMGALPGMVWQDRDVYLQGPIWAKIPHTDGHFHPSPLMGGFGLKNPPPQILIKNTPVPANPPAEFSATKFASFITQYSTGQVSVEIEWELQKENSKRWNPEVQYTSNYAKSANVDFTVDNNGLYTEPRPIGTRYLTRPL

SEQ ID NO: 334 - DNA, 2211 bp, Artificial Sequence
  Description of Artificial Sequence: Synthetic polynucleotide
atggctgccgatggttatcttccagattggctcgaggacaacctctctgagggcattcgcgagtggtgggacttgaaacctggagcccctaaacccaaggcaaatcaacaacatcaggacaacgctcgaggtcttgtgcttccgggttacaaataccttggacccggcaacggactcgacaagggggagccggtcaacgcagcagacgcggcggccctcgagcacgacaaggcctacgaccagcagctcaaggccggagacaacccgtacctcaagtacaaccacgccgacgccgagttccaggagcggctcaaagaagatacgtcttttgggggcaacctcgggcgagcagtcttccaggccaaaaagaggcttcttgaacctcttggtctggttgaggaagcggctaagacggctcctggaaagaagagaccggtagagccatcaccccagcgttctccagactcctctacgggcatcggcaagaaaggccaacagcccgctaaaaagagactcaattttggtcagactggcgactcagagtcagtccccgacccacaacctctcggagaacctccagcaacccccgctgctgtgggacctactacaatggcttcaggcggtggcgcaccaatggcagacaataacgagggtgccgatggagtgggtaattcctcaggaaattggcattgcgattcccaatggctgggcgacagagtcatcaccaccagcaccagaacctgggccctgcccacttacaacaaccatctctacaagcaaatctccagccaatcaggagcttcaaacgacaaccactactttggctacagcaccccttgggggtattttgactttaacagattccactgccacttttcaccacgtgactggcaaagactcatcaacaacaactggggattccgacccaagagactcaacttcaagctcttcaacatccaagtcaaggaggtcacgacgaatgatggcgtcacgaccatcgctaataaccttaccagcacggttcaagtcttctcggactcggagtaccagttgccgtacgtcctcggctctgcgcaccagggctgcctccctccgttcccggcggacgtgttcatgattccgcagtacggctacctaacgctcaacaatggcagccaagccgtgggacgttcatccttttactgcctggaatatttcccttctcagatgctgagaacgggcaacaactttaccttcagctacacttttgaggacgttcctttccacagcagctacgctcacagccagagtctggaccgtctcatgaatcccctcatcgaccagtacctgtattacttgagcagaacaaacactccaagtggaaccaccacgcagtcaaggcttcagttttctcaggccggagcgagtgacattcgggaccagtctaggaactggcttcctggaccctgttaccggcagcagcgcgtttctaaaacaaaaacagacaacaacaacagcaactttacctggactggtgcttcaaaatataaccttaatgggcgtgaatctataatcaaccctggcactgctatggcctcacacaaagacgacgaagacaagttctttcccatgagcggtgtcatgatttttggaaaggagagcgccggagcttcaaacactgcattggacaatgtcatgatcacagacgaagaggaaatcaaagccactaaccccgtggccaccgaaagatttgggactgtggcagtcaatctccagagcagcagcacagaccctgcgaccggagatgtgcatgttatgggagccttacctggaatggtgtggcaagacagagacgtgtacctgcagggtcctatttgggccaaaattcctcacacggatggacactttcacccgtctcctctcatgggcggctttggacttaagcacccgcctcctcagatcctcatcaaaaacacgcctgttcctgcgaatcctccggcagagttttcggctacaaagtttgcttcattcatcacccagtattccacaggacaagtgagtgtggaaattgaatgggagctgcagaaagaaaacagcaagcgctggaatcccgaagtgcagtacacatccaattatgcaaaatctgccaacgttgattttactgtggacaacaatggactttatactgagcctcgccccattggcacccgttacctcacccgtcccctgtaa

SEQ ID NO: 335 - protein, 736 aa, Artificial Sequence
  Description of Artificial Sequence: Synthetic polypeptide
MAADGYLPDWLEDNLSEGIREWWDLKPGAPKPKANQQHQDNARGLVLPGYKYLGPGNGLDKGEPVNAADAAALEHDKAYDQQLKAGDNPYLKYNHADAEFQERLKEDTSFGGNLGRAVFQAKKRLLEPLGLVEEAAKTAPGKKRPVEPSPQRSPDSSTGIGKKGQQPAKKRLNFGQTGDSESVPDPQPLGEPPATPAAVGPTTMASGGGAPMADNNEGADGVGNSSGNWHCDSQWLGDRVITTSTRTWALPTYNNHLYKQISSQSGASNDNHYFGYSTPWGYFDFNRFHCHFSPRDWQRLINNNWGFRPKRLNFKLFNIQVKEVTTNDGVTTIANNLTSTVQVFSDSEYQLPYVLGSAHQGCLPPFPADVFMIPQYGYLTLNNGSQAVGRSSFYCLEYFPSQMLRTGNNFTFSYTFEDVPFHSSYAHSQSLDRLMNPLIDQYLYYLSRTNTPSGTTTQSRLQFSQAGASDIRDQSRNWLPGPCYRQQRVSKTKTDNNNSNFTWTGASKYNLNGRESIINPGTAMASHKDDEDKFFPMSGVMIFGKESAGASNTALDNVMITDEEEIKATNPVATERFGTVAVNLQSSSTDPATGDVHVMGALPGMVWQDRDVYLQGPIWAKIPHTDGHFHPSPLMGGFGLKHPPPQILIKNTPVPANPPAEFSATKFASFITQYSTGQVSVEIEWELQKENSKRWNPEVQYTSNYAKSANVDFTVDNNGLYTEPRPIGTRYLTRPL

SEQ ID NO: 336 - DNA, 2214 bp, Artificial Sequence
  Description of Artificial Sequence: Synthetic polynucleotide
atggctgccgatggttatcttccagattggctcgaggacaaccttagtgaaggaattcgcgagtggtgggctttgaaacctggagcccctcaacccaaggcaaatcaacaacatcaagacaacgctcgaggtcttgtgcttccgggttacaaataccttggacccggcaacggactcgacaagggggagccggtcaacgcagcagacgcggcggccctcgagcacgacaaggcctacgaccagcagctgcaggcgggtgacaatccgtacctgcggtataaccacgccgacgccgagtttcaggagcgtctgcaagaagatacgtcttttgggggcaaccttggcagagcagtcttccaggccaaaaagaggatccttgagcctcttggtctggttgaggaagcagctaaaacggctcctggaaagaagaggcctgtagatcagtctcctcaggaaccggactcatcatctggtgttggcaaatcgggcaaacagcctgccagaaaaagactaaatttcggtcagactggcgactcagagtcagtcccagaccctcaacctctcggagaaccaccagcagcccccacaagtttgggatctaatacaatggcttcaggcggtggcgcaccaatggcagacaataacgagggtgccgatggggtgggtagttcctcgggaaattggcattgcgattcccaatgactgggggacagagtcatcaccaccagcacccgaacctgggccctgcccacctacaacaatcacctctacaagcaaatctccaacgggacatcgggaggagccaccaacgacaacacctacttcggctacagcaccccctgggggtattttgactttaacagattccactgccacttttcaccacgtgactggcagcgactcatcaacaacaactggggattccggcccaagagactcagcttcaagctcttcaacatccaggtcaaggaggtcacgcagaatgaaggcaccaagaccatcgccaataacctcaccagcaccatccaggtgtttacggactcggagtaccagctgccgtacgttctcggctctgcgcaccagggctgcctccctccgttcccggcggacgtgttcatgattccgcaatacggctacctgacgctcaacaatggcagccaagccgtgggacgttcatccttttactgcctggaatatttcccttctcagatgctgagaacgggcaacaactttaccttcagctacacctttgaggaagtgcctttccacagcagctacgcgcacagccagagcttggaccggctgatgaatcctctgattgaccagtacctgtactacttgtctcggactcaaacaacaggaggcacggcaaatacgcagactctgggcttcagccaaggtgggcctaatacaatggccaatcaggcaaagaactggctgccaggaccctgttaccgccaacaacgcgtctcaacgacaaccgggcaaaacaacaatagcaactttgcctggactgctgggaccaaataccatctgaatggaagaaattcattggctaatcctggcatcgctatggcaacacacaaagacgacgaggagcgtttttttcccagtaacgggatcctgatttttggcaaacaaaatgctgccagagacaatgcggattacagcgatgtcatgctcaccagcgaggaagaaatcaaaaccactaaccctgtggctacagaggaatacggtatcgtggcagataacttgcagcagcaaaacacggctcctcaaattggaactgtcaacagccagggggccttacccggtatggtctggcagaaccgggacgtgtacctgcagggtcccatctgggccaagattcctcacacggacggcaacttccacccgtctccgctgatgggcggctttggcctgaaacatcctccgcctcagatcctgatcaagaacacgcctgtacctgcggatcctccgaccaccttcaaccagtcaaagctgaactctttcatcacgcaatacagcaccggacaggtcagcgtggagatcgagtgggagctgcagaaggaaaacagcaagcgctggaacccggagatccagtacacttccaactattacaagtctaataatgttgaatttgctgttaatactgaaggtgtatatagtgaaccccgccccattggcaccagatacctgactcgtaatctgtaa

SEQ ID NO: 337 - protein, 736 aa, Artificial Sequence
  Description of Artificial Sequence: Synthetic polypeptide
MAADGYLPDWLEDNLSEGIREWWALKPGAPQPKANQQHQDNARGLVLPGYKYLGPGNGLDKGEPVNAADAAALEHDKAYDQQLQAGDNPYLRYNHADAEFQERLQEDTSFGGNLGRAVFQAKKRILEPLGLVEEAAKTAPGKKRPVDQSPQEPDSSSGVGKSGKQPARKRLNFGQTGDSESVPDPQPLGEPPAAPTSLGSNTMASGGGAPMADNNEGADGVGSSSGNWHCDSQLGDRVITTSTRTWALPTYNNHLYKQISNGTSGGATNDNTYFGYSTPWGYFDFNRFHCHFSPRDWQRLINNNWGFRPKRLSFKLFNIQVKEVTQNEGTKTIANNLTSTIQVFTDSEYQLPYVLGSAHQGCLPPFPADVFMIPQYGYLTLNNGSQAVGRSSFYCLEYFPSQMLRTGNNFTFSYTFEEVPFHSSYAHSQSLDRLMNPLIDQYLYYLSRTQTTGGTANTQTLGFSQGGPNTMANQAKNWLPGPCYRQQRVSTTTGQNNNSNFAWTAGTKYHLNGRNSLANPGIAMATHKDDEERFFPSNGILIFGKQNAARDNADYSDVMLTSEEEIKTTNPVATEEYGIVADNLQQQNTAPQIGTVNSQGALPGMVWQNRDVYLQGPIWAKIPHTDGNFHPSPLMGGFGLKHPPPQILIKNTPVPADPPTTFNQSKLNSFITQYSTGQVSVEIEWELQKENSKRWNPEIQYTSNYYKSNNVEFAVNTEGVYSEPRPIGTRYLTRNL

SEQ ID NO: 338 - DNA, 2214 bp, Artificial Sequence
  Description of Artificial Sequence: Synthetic polynucleotide
atggctgccgatggttatcttccagattggctcgaggacaaccttagtgaaggaattcgcgagtggtgggctttgaaacctggagcccctcaacccaaggcaaatcaacaacatcaagacaacgctcgaggtcttgtgcttccgggttacaaataccttggacccggcaacggactcgacaagggggagccggtcaacgcagcagacgcggcggccctcgagcacgacaaggcctacgaccagcagctgcaggcgggtgacaatccgtacctgcggtataaccacgccgacgccgagtttcaggagcgtctgcaagaagatacgtcttttgggggcaaccttggcagagcagtcttccaggccaaaaagaggatccttgagcctcttggtctggttgaggaagcagctaaaacggctcctggaaagaagaggcctgtagatcagtctcctcaggaaccggactcatcatctggtgttggcaaatcgggcaaacagcctgccagaaaaagactaaatttcggtcagactggcgactcagagtcagtcccagaccctcaacctctcggagaaccaccagcagcccccacaagtttgggatctaatacaatggcttcaggcggtggcgcaccaatggcagacaataacgagggtgccgatggggtgggtagttcctcgggaaattggcattgcgattcccaatggctgggggacagagtcatcaccaccagcacccgaacctgggccctgcccacctacaacaatcacctctacaagcaaatctccaacgggacatcgggaggagccaccaacgacaacacctacttcggctacagcaccccctgggggtattttgactttaacagattccactgccacttttcaccacgtgactggcagcgactcatcaacaacaactggggattccggcccaagagactcagcttcaagctcttcaacatccaggtcaaggaggtcacgcagaatgaaggcaccaagaccatcgccaataacctcaccagcaccatccaggtgtttacggactcggagtaccagctgccgtacgttctcggctctgcgcaccagggctgcctccctccgttcccggcggacgtgttcatgattccgcaatacggctacctgacgctcaacaatggcagccaagccgtgggacgttcatccttttactgcctggaatatttcccttctcagatgctgagaacgggcaacaactttaccttcagctacacctttgaggaagtgccttttcacagcagctacgcgcacagccagagcttggaccggctgatgaatcctctgattgaccagtacctgtactacttgtctcggactcaaacaacaggaggcacggcaaatacgcagactctgggcttcagccaaggtgggcctaatacaatggccaatcaggcaaagaactggctgccaggaccctgttaccgccaacaacgcgtctcaacgacaaccgggcaaaacaacaatagcaactttgcctggactgctgggaccaaataccatctgaatggaagaaattcattggctaatcctggcatcgctatggcaacacacaaagacgacgaggagcgtttttttcccagtaacgggatcctgatttttggcaaacaaaatgctgccagagacaatgcggattacagcgatgtcatgctcaccagcgaggaagaaatcaaaaccactaaccctgtggctacagaggaatacggtatcgtggcagataacttgcagcagcaaaacacggctcctcaaattggaactgtcaacagccagggggccttacccggtatggtctggcagaaccgggacgtgtacctgcagggtcccatctgggccaagattcctcacacggacggcaacttccacccgtctccgctgatgggcggctttggcctgaaacatcctccgcctcagatcctgatcaagaacacgcctgtacctgcggatcctccgaccaccttcaaccagtcaaagctgaactctttcatcacgcaatacagcaccggacaggtcagcgtggagatcgagtgggagctgcagaaggaaaacagcaagcgctggaacccggagatccagtacacttccaactattacaagtctaataatgttgaatttgctgttaatactgaaggtgtatatagtgaaccccgccccattggcaccagatacctgactcgtaatctgtaa

SEQ ID NO: 339 - protein, 737 aa, Artificial Sequence; identical to SEQ ID NO: 327
  Description of Artificial Sequence: Synthetic polypeptide

SEQ ID NO: 340 - DNA, 2211 bp, Artificial Sequence
  Description of Artificial Sequence: Synthetic polynucleotide
atggctgccgatggttatcttccagattggctcgaggacaacctctctgagggcattcgcgagtggtgggacttgaaacctggagcccctaaacccaaggcaaatcaacaacatcaggacaacgctcgaggtcttgtgcttccgggttacaaataccttggacccggcaacggactcgacaagggggagccggtcaacgcagcagacgcggcggccctcgagcacgacaaggcctacgaccagcagctcaaggccggagacaacccgtacctcaagtacaaccacgccgacgccgagttccaggagcggctcaaagaagatacgtcttttgggggcaacctcgggcgagcagtcttccaggccaaaaagaggcttcttgaacctcttggtctggttgaggaagcggctaagacggctcctggaaagaagagaccggtagagccatcaccccagcgttctccagactcctctacgggcatcggcaagaaaggccaacagcccgctaaaaagagactcaattttggtcagactggcgactcagagtcagtccccgacccacaacctctcggagaacctccagcaacccccgctgctgtgggacctactacaatggcttcaggcggtggcgcaccaatggcagacaataacgagggtgccgatggagtgggtaattcctcaggaaattggcattgcgattcccaatggctgggcgacagagtcatcaccaccagcaccagaacctgggccctgcccacttacaacaaccatctctacaagcaaatctccagccaatcaggagcttcaaacgacaaccactactttggctacagcaccccttgggggtattttgactttaacagattccactgccacttttcaccacgtgactggcaaagactcatcaacaacaactggggattccgacccaagagactcaacttcaagctcttcaacatccaagtcaaggaggtcacgacgaatgatggcgtcacgaccatcgctaataaccttaccagcacggttcaagtcttctcggactcggagtaccagttgccgtacgtcctcggctctgcgcaccagggctgcctccctccgttcccggcggacgtgttcatgattccgcagtacggctacctaacgctcaacaatggcagccaagccgtgggacgttcatccttttactgcctggaatatttcccttctcagatgctgagaacgggcaacaactttaccttcagctacacttttgaggacgttcctttccacagcagctacgctcacagccagagtctggaccgtctcatgaatcctctcatcgaccagtacctgtattacttgagcagaacaaacactccaagtggaaccaccacgcagtcaaggcttcagttttctcaggccggagcgagtgacattcgggaccagtctaggaactggcttcctggaccctgttaccgccagcagcgcgtttctaaaacaaaaacagacaacaacaacagcaattttacctggactggtgcttcaaaatataaccttaatgggcgtgaatctataatcaaccctggcactgctatggcctcacacaaagacgacgaagacaagttctttcccatgagcggtgtcatgatttttggaaaagagagcgccggagcttcaaacactgcattggacaatgtcatgattacagacgaagaggaaattaaagccactaaccctgtggccaccgaaagatttgggaccgtggcagtcaatttccagagcagcagcacagaccctgcgaccggagatgtgcatgctatgggagcattacctggcatggtgtggcaagatagagacgtgtacctgcagggtcccatttgggccaaaattcctcacacagatggacactttcacccgtctcctcttatgggcggctttggactcaagaacccgcctcctcagatcctcatcaaaaacacgcctgttcctgcgaatcctccggcggagttttcagctacaaagtttgcttcattcatcacccaatactccacaggacaagtgagtgtggaaattgaatgggagctgcagaaagaaaacagcaagcgctggaatcccgaagtgcagtacacatccaattatgcaaaatctgccaacgttgattttactgtggacaacaatggactttatactgagcctcgccccattggcacccgttaccttacccgtcccctgtaa

SEQ ID NO: 341 - protein, 736 aa, Artificial Sequence
  Description of Artificial Sequence: Synthetic polypeptide
MAADGYLPDWLEDNLSEGIREWWDLKPGAPKPKANQQHQDNARGLVLPGYKYLGPGNGLDKGEPVNAADAAALEHDKAYDQQLKAGDNPYLKYNHADAEFQERLKEDTSFGGNLGRAVFQAKKRLLEPLGLVEEAAKTAPGKKRPVEPSPQRSPDSSTGIGKKGQQPAKKRLNFGQTGDSESVPDPQPLGEPPATPAAVGPTTMASGGGAPMADNNEGADGVGNSSGNWHCDSQWLGDRVITTSTRTWALPTYNNHLYKQISSQSGASNDNHYFGYSTPWGYFDFNRFHCHFSPRDWQRLINNNWGFRPKRLNFKLFNIQVKEVTTNDGVTTIANNLTSTVQVFSDSEYQLPYVLGSAHQGCLPPFPADVFMIPQYGYLTLNNGSQAVGRSSFYCLEYFPSQMLRTGNNFTFSYTFEDVPFHSSYAHSQSLDRLMNPLIDQYLYYLSRTNTPSGTTTQSRLQFSQAGASDIRDQSRNWLPGPCYRQQRVSKTKTDNNNSNFTWTGASKYNLNGRESIINPGTAMASHKDDEDKFFPMSGVMIFGKESAGASNTALDNVMITDEEEIKATNPVATERFGTVAVNFQSSSTDPATGDVHAMGALPGMVWQDRDVYLQGPIWAKIPHTDGHFHPSPLMGGFGLKNPPPQILIKNTPVPANPPAEFSATKFASFITQYSTGQVSVEIEWELQKENSKRWNPEVQYTSNYAKSANVDFTVDNNGLYTEPRPIGTRYLTRPL

SEQ ID NO: 342 - DNA, 2211 bp, Artificial Sequence
  Description of Artificial Sequence: Synthetic polynucleotide
atggctgccgatggttatcttccagattggctcgaggacaaccttagtgaaggaattcgcgagtggtgggcgctgaaacctggagccccgaagcccaaagccaaccagcaaaagcaggacgacggccggggtctggtgcttccgggttacaaatacctcggacccggtaacggactcgacaaaggagagccggtcaacgaggcggacgcggcagccctcgagcacgacaaggcctacgaccagcagctcaaagcgggtgacaatccgtacctgcggtataaccacgccgacgccgagtttcaggagcgtctgcaagaagatacgtcttttgggggcaacctcgggcgagcagtcttccaggccaagaagcgggttctcgaacctctcggtctggttgaggaaggcgctaagacggctcccggaaagaaacgtccggtagagcagtcgccacaagagccagactcctctacgggcatcggcaagaaaggccaacagcccgccagaaaaagactcaatttcggtcagactggcgactcagagtcagttccagaccctcaacctctcggagaacctccagcagcgccctctggtgtgggacctactacaatggcttcaggcggtggcgcaccaatggcagacaataacgaaggcgccgacggagtgggtaatgcctcaggaaattggcattgcgattccacatggctgggcgacagagtcatcaccaccagcacccgaacatgggccttgcccacctataacaaccacctctacaagcaaatctccagtgcttcaacgggggccagcaacgacaacacctacttcggctacagcaccccctgggggtattttgatttcaacagattccactgccatttctcaccacgtgactggcagcgactcatcaacaacaattggggattccggcccaagagactcaacttcaaactcttcaacatccaagtcaaggaggtcacgacgaatgatggcgtcacgaccatcgctaataaccttaccagcacggttcaagtcttctcggactcggagtaccagttgccgtacgtcctcggctctgcgcaccagggctgcctccctccgttcccggcggacgtgttcatgattccgcagtacggctacctaacgctcaacaatggcagccaggcagtgggacggtcatccttttactgcctggaatatttcccatcgcagatgctgagaacgggcaataactttaccttcagctacaccttcgaggacgtgcctttccacagcagctacgcgcacagccagagcctggaccggctgatgaatcctctcatcgaccagtacctgtattacctgaacagaactcagaatcagtccggaagtgcccaaaacaaggacttgctgtttagccgggggtctccagctggcatgtctgttcagcccaaaaactggctacctggaccctgttatcggcagcagcgcgtttctaaaacaaaaacagacaacaacaacagcaattttacctggactggtgcttcaaaatataacctcaatgggcgtgaatccatcatcaaccctggcactgctatggcctcacacaaagacgacgaagacaagttctttcccatgagcggtgtcatgatttttggaaaagagagcgccggagcttcaaacactgcattggacaatgtcatgattacagacgaagaggaaattaaagccactaaccctgtggccaccgaaagatttgggaccgtggcagtcaatttccagagcagcagcacagaccctgcgaccggagatgtgcatgttatgggagccttacctggaatggtgtggcaagacagagacgtatacctgcagggtcctatttgggccaaaattcctcacacagatggacactttcacccgtctcctcttatgggcggctttggactcaagaacccgcctcctcagatcctcatcaaaaacacgcctgttcctgcgaatcctccggcagagttttcggctacaaagtttgcttcattcatcacccagtattccacaggacaagtgagcgtggagattgaatgggagctgcagaaagaaaacagcaaacgctggaatcccgaagtgcagtatacatctaactatgcaaaatctgccaacgttgatttcactgtggacaacaatggactttatactgagcctcgccccattggcacccgttacctcacccgtcccctgtaa

SEQ ID NO: 343 - protein, 736 aa, Artificial Sequence
  Description of Artificial Sequence: Synthetic polypeptide
MAADGYLPDWLEDNLSEGIREWWALKPGAPKPKANQQKQDDGRGLVLPGYKYLGPGNGLDKGEPVNEADAAALEHDKAYDQQLKAGDNPYLRYNHADAEFQERLQEDTSFGGNLGRAVFQAKKRVLEPLGLVEEGAKTAPGKKRPVEQSPQEPDSSTGIGKKGQQPARKRLNFGQTGDSESVPDPQPLGEPPAAPSGVGPTTMASGGGAPMADNNEGADGVGNASGNWHCDSTWLGDRVITTSTRTWALPTYNNHLYKQISSASTGASNDNTYFGYSTPWGYFDFNRFHCHFSPRDWQRLINNNWGFRPKRLNFKLFNIQVKEVTTNDGVTTIANNLTSTVQVFSDSEYQLPYVLGSAHQGCLPPFPADVFMIPQYGYLTLNNGSQAVGRSSFYCLEYFPSQMLRTGNNFTFSYTFEDVPFHSSYAHSQSLDRLMNPLIDQYLYYLNRTQNQSGSAQNKDLLFSRGSPAGMSVQPKNWLPGPCYRQQRVSKTKTDNNNSNFTWTGASKYNLNGRESIINPGTAMASHKDDEDKFFPMSGVMIFGKESAGASNTALDNVMITDEEEIKATNPVATERFGTVAVNFQSSSTDPATGDVHVMGALPGMVWQDRDVYLQGPIWAKIPHTDGHFHPSPLMGGFGLKNPPPQILIKNTPVPANPPAEFSATKFASFITQYSTGQVSVEIEWELQKENSKRWNPEVQYTSNYAKSANVDFTVDNNGLYTEPRPIGTRYLTRPL

SEQ ID NO: 344 - DNA, 2205 bp, Artificial Sequence
  Description of Artificial Sequence: Synthetic polynucleotide
atggctgctgacggttatcttccagattggctcgaggacaacctttctgaaggcattcgtgagtggtgggctctgaaacctggagtccctcaacccaaagcgaaccaacaacaccaggacaaccgtcggggtcttgtgcttccgggttacaaatacctcggacccggtaacggactcgacaaaggagagccggtcaacgaggcggacgcggcagccctcgaacacgacaaggcctacgaccagcagctcaaggccggagacaacccgtacctcaagtacaaccacgccgacgccgagttccaggagcggctcaaagaagatacgtcttttgggggcaacctcgggcgagcagtcttccaggccaaaaagaggcttcttgaacctcttggtctggttgaggaagcggctaagacggctcctggaaagaagaggcctgtagagcagtctcctcaggaaccggactcctccgcgggtattggcaaatcgggtgcacagcccgctaaaaagagactcaatttcggtcagactggcgacacagagtcagtcccagaccctcaaccaatcggagaacctcccgcagccccctcaggtgtgggatctcttacaatggcttcaggtggtggcgcaccagtggcagacaataacgaaggtgccgatggagtgggtagttcctcgggaaattggcattgcgattcccaatggctgggggacagagtcatcaccaccagcacccgaacctgggccctgcccacctacaacaaccacctctacaaacaaatttccagccaatcaggagcctcgaacgacaatcactactttggctacagcaccccttgggggtattttgacttcaacagattccactgccacttttcaccacgtgactggcagcgactcatcaacaacaactggggattccggcccaagagactcagcttcaagctcttcaacatccaggtcaaagaggttacggacaacaatggagtcaagaccatcgccaataaccttaccagcacggtccaggtcttcacggactcagactatcagctcccgtacgtgctcgggtcggctcacgagggctgcctcccgccgttcccagcggacgttttcatgattcctcagtacgggtatctgacgcttaatgatggaagccaggccgtgggtcgttcgtccttttactgcctggaatatttcccgtcgcaaatgctaagaacgggtaacaacttccagttcagctacgagtttgagaacgtacctttccatagcagctacgctcacagccaaagcctggaccgactaatgaatccactcatcgaccaatacttgtactatctctcaaagactattaacggttctggacagaatcaacaaacgctaaaattcagtgtggccggacccagcaacatggctgtccagggaagaaactacatacctggacccagctaccgacaacaacgtgtctcaaccactgtgactcaaaacaacaacagcgaatttgcttggcctggagcttcttcttgggctctcaatggacgtaatagcttgatgaatcctggacctgctatggccagccacaaagaaggagaggaccgtttctttcctttgtctggatctttaatttttggcaaacaaggaactggaagagacaacgtggatgcggacaaagtcatgataaccaacgaagaagaaattaaaactactaacccggtagcaacggagtcctatggacaagtggccacaaaccaccagagtgcccaagcacaggcgcagaccggctgggttcaaaaccaaggaatacttccgggtatggtttggcaggacagagatgtgtacctgcaaggacccatctgggccaagattcctcacacggacggcaacttccacccgtctccgctgatgggcggctttggcctgaaacatcctccgcctcagatcctgatcaagaacacgcctgtacctgcggatcctccgaccaccttcaaccagtcaaagctgaactctttcatcacgcaatacagcaccggacaggtcagcgtggaaattgaatgggagctgcagaaggaaaacagcaagcgctggaatcccgaagtgcagtatacatctaactatgcaaaatctgccaacgttgatttcactgtggacaacaatggactttatactgagcctcgccccattggcacccgttacctcacccgtcccctgtaa

SEQ ID NO: 345 - protein, 734 aa, Artificial Sequence
  Description of Artificial Sequence: Synthetic polypeptide
MAADGYLPDWLEDNLSEGIREWWALKPGVPQPKANQQHQDNRRGLVLPGYKYLGPGNGLDKGEPVNEADAAALEHDKAYDQQLKAGDNPYLKYNHADAEFQERLKEDTSFGGNLGRAVFQAKKRLLEPLGLVEEAAKTAPGKKRPVEQSPQEPDSSAGIGKSGAQPAKKRLNFGQTGDTESVPDPQPIGEPPAAPSGVGSLTMASGGGAPVADNNEGADGVGSSSGNWHCDSQWLGDRVITTSTRTWALPTYNNHLYKQISSQSGASNDNHYFGYSTPWGYFDFNRFHCHFSPRDWQRLINNNWGFRPKRLSFKLFNIQVKEVTDNNGVKTIANNLTSTVQVFTDSDYQLPYVLGSAHEGCLPPFPADVFMIPQYGYLTLNDGSQAVGRSSFYCLEYFPSQMLRTGNNFQFSYEFENVPFHSSYAHSQSLDRLMNPLIDQYLYYLSKTINGSGQNQQTLKFSVAGPSNMAVQGRNYIPGPSYRQQRVSTTVTQNNNSEFAWPGASSWALNGRNSLMNPGPAMASHKEGEDRFFPLSGSLIFGKQGTGRDNVDADKVMITNEEEIKTTNPVATESYGQVATNHQSAQAQAQTGWVQNQGILPGMVWQDRDVYLQGPIWAKIPHTDGNFHPSPLMGGFGLKHPPPQILIKNTPVPADPPTTFNQSKLNSFITQYSTGQVSVEIEWELQKENSKRWNPEVQYTSNYAKSANVDFTVDNNGLYTEPRPIGTRYLTRPL

SEQ ID NO: 346 - DNA, 2211 bp, Artificial Sequence
  Description of Artificial Sequence: Synthetic polynucleotide
atggctgccgatggttatcttccagattggctcgaggacaacctctctgagggcattcgcgagtggtgggcgctgaaacctggagccccgaagcccaaagccaaccagcaaaagcaggacgacggccggggtctggtgcttcctggctacaagtacctcggacccttcaacggactcgacaagggggagcccgtcaacgcggcggacgcagcggccctcgagcacgacaaggcctacgaccagcagctgcaggcgggtgacaatccgtacctgcggtataaccacgccgacgccgagtttcaggagcgtctgcaagaagatacgtcttttgggggcaacctcgggcgagcagtcttccaggccaagaagtgggttctcgaacctctcggtctggttgaggaaggcgctaagacggctcctggaaagaaacgtccggtagagcagtcgccacaagagccagactcctcctcgggcatcggcaagacaggccagcagcccgctaaaaagagactcaattttggtcagactggcgactcagagtcagtccccgacccacaacctctcggagaacctccagcaacccccgctgctgtgggacctactacaatggcttcaggcggtggcgcaccaatggcagacaataacgaaggcgccgacggagtgggtaatgcctcaggaaattggcattgcgattccacatggctgggcgacagagtcatcaccaccagcacccgcacctgggccttgcccacctacaataaccacctctacaagcaaatctccagtgcttcaacgggggccagcaacgacaaccactacttcggctacagcaccccctgggggtattttgatttcaacagattccactgccatttctcaccacgtgactggcagcgactcatcaacaacaattggggattccggcccaagagactcaacttcaagctcttcaacatccaagtcaaggaggtcacgacgaatgatggcgtcacaaccatcgctaataaccttaccagcacggttcaagtcttctcggactcggagtaccagcttccgtacgtcctcggctctgcgcaccagggctgcctccctccgttcccggcggacgtgttcatgattccgcaatacggctacctgacgctcaacaatggcagccaagccgtgggacgttcatccttttactgcctggaatatttcccttctcagatgctgagaacgggcaacaactttaccttcagctacacctttgaggaagtgcctttccacagcagctacgcgcacagccagagcctggaccggctgatgaatcctctcatcgaccaatacctgtattacctgaacagaactcaaaatcagtccggaagtgcccaaaacaaggacttgctgtttagccgtgggtctccagctggcatgtctgttcagcccaaaaactggctacctggaccctgttatcggcagcagcgcgtttctaaaacaaaaacagacaacaacaacagcaattttacctggactggtgcttcaaaatataacctcaatgggcgtgaatccatcatcaaccctggcactgctatggcctcacacaaagacgacgaagacaagttctttcccatgagcggtgtcatgatttttggaaaggagagcgccggagcttcaaacactgcattggacaatgtcatgatcaccgacgaagaggaaatcaaagccactaaccccgtggccaccgaaagatttgggactgtggcagtcaatctccagagcagcagcacagaccctgcgaccggagatgtgcatgttatgggagccttacctggcatggtgtggcaagatagagacgtgtacctgcagggtcccatttgggccaaaattcctcacacagatggacactttcacccgtctcctcttatgggcggctttggactcaagaacccgcctcctcagatcctcatcaaaaacacgcctgttcctgcgaatcctccggcggagttttcagctacaaagtttgcttcattcatcacccaatactccacaggacaagtgagtgtggaaattgaatgggagctgcagaaagaaaacagcaagcgctggaatcccgaagtgcagtacacatccaattatgcaaaatctgccaacgttgattttactgtggacaacaatggactttatactgagcctcgccccattggcacccgttacctcacccgtcccctgtaa

SEQ ID NO: 347 - protein, 736 aa, Artificial Sequence
  Description of Artificial Sequence: Synthetic polypeptide
MAADGYLPDWLEDNLSEGIREWWALKPGAPKPKANQQKQDDGRGLVLPGYKYLGPFNGLDKGEPVNAADAAALEHDKAYDQQLQAGDNPYLRYNHADAEFQERLQEDTSFGGNLGRAVFQAKKWVLEPLGLVEEGAKTAPGKKRPVEQSPQEPDSSSGIGKTGQQPAKKRLNFGQTGDSESVPDPQPLGEPPATPAAVGPTTMASGGGAPMADNNEGADGVGNASGNWHCDSTWLGDRVITTSTRTWALPTYNNHLYKQISSASTGASNDNHYFGYSTPWGYFDFNRFHCHFSPRDWQRLINNNWGFRPKRLNFKLFNIQVKEVTTNDGVTTIANNLTSTVQVFSDSEYQLPYVLGSAHQGCLPPFPADVFMIPQYGYLTLNNGSQAVGRSSFYCLEYFPSQMLRTGNNFTFSYTFEEVPFHSSYAHSQSLDRLMNPLIDQYLYYLNRTQNQSGSAQNKDLLFSRGSPAGMSVQPKNWLPGPCYRQQRVSKTKTDNNNSNFTWTGASKYNLNGRESIINPGTAMASHKDDEDKFFPMSGVMIFGKESAGASNTALDNVMITDEEEIKATNPVATERFGTVAVNLQSSSTDPATGDVHVMGALPGMVWQDRDVYLQGPIWAKIPHTDGHFHPSPLMGGFGLKNPPPQILIKNTPVPANPPAEFSATKFASFITQYSTGQVSVEIEWELQKENSKRWNPEVQYTSNYAKSANVDFTVDNNGLYTEPRPIGTRYLTRPL

SEQ ID NO: 348 - DNA, 2214 bp, Artificial Sequence
  Description of Artificial Sequence: Synthetic polynucleotide
atggctgccgatggttatcttccagattggctcgaggacaaccttagtgaaggaattcgcgagtggtgggctttgaaacctggagcccctcaacccaaggcaaatcaacaacatcaagacaacgctcgaggtcttgtgcttccgggttacaaataccttggacccggcaacggactcgacaagggggagccggtcaacgcagcagacgcggcggccctcgagcacgacaaggcctacgaccagcagctgcaggcgggtgacaatccgtacctgcggtataaccacgccgacgccgagtttcaggagcgtctgcaagaagatacgtcttttgggggcaaccttggcagagcagtcttccaggccaaaaagaggatccttgagcctcttggtctggttgaggaagcagctaaaacggctcctggaaagaagaggcctgtagatcagtctcctcaggaaccggactcatcatctggtgttggcaaatcgggcaaacagcctgccagaaaaagactaaatttcggtcagactggcgactcagagtcagtcccagaccctcaacctctcggagaaccaccagcagcccccacaagtttgggatctaatacaatggcttcaggcggtggcgcaccaatggcagacaataacgagggtgccgatggggtgggtagttcctcgggaaattggcattgcgattcccaatggctgggggacagagtcatcaccaccagcacccgaacctgggccctgcccacctacaacaatcacctctacaagcaaatctccaacgggacatcgggaggagccaccaacgacaacacctacttcggctacagcaccccctgggggtattttgactttaacagattccactgccacttttcaccacgtgactggcagcgactcatcaacaacaactggggattccggcccaagagactcagcttcaagctcttcaacatccaggtcaaggaggtcacgcagaatgaaggcaccaagaccatcgccaataacctcaccagcaccatccaggtgtttacggactcggagtaccagctgccgtacgttctcggctcggcgcaccagggctgcctccctccgttcccggcggacgtcttcatggtgccacagtatggatacctgacgctcaacaatggcagccaagccgtgggacgttcatccttttactgcctggaatatttcccttctcagatgctgagaacgggcaacaactttaccttcagctacacctttgaggaagtgcctttccacagcagctacgcgcacagccagagcttggaccggctgatgaatcctctgattgaccagtacctgtactacttgtctcggactcaaacaacaggaggcacggcaaatacgcagactctgggcttcagccaaggtgggcctaatacaatggccaatcaggcaaagaactggctgccaggaccctgttaccgccaacaacgcgtctcaacgacaaccgggcaaaacaacaatagcaactttgcctggactgctgggaccaaataccatctgaatggaagaaattcattggctaatcctggcatcgctatggcaacacacaaagacgacgaggagcgtttttttcccagtaacgggatcctgatttttggcaaacaaaatgctgccagagacaatgcggattacagcgatgtcatgctcaccagcgaggaagaaatcaaaaccactaaccctgtggctacagaggaatacggtatcgtggcagataacttgcagcagcaaaacacggctcctcaaattggaactgtcaacagccagggggacttacccggtatggtctggcagaaccgggacgtgtacctgcagggtcccatctgggccaagattcctcacacggacggcaacttccacccgtctccgctgatgggcggctttggcctgaaacatcctccgcctcagatcctgatcaagaacacgcctgtacctgcggatcctccgaccaccttcaaccagtcaaagctgaactctttcatcacgcaatacagcaccggacaggtcagcgtggagatcgagtgggagctgcagaaggaaaacagcaagcgctggaacccggagatccagtacacttccaactattacaagtctaataatgttgaatttgctgttaatactgaaggtgtatatagtgaaccccgccccattggcaccagatacctgactcgtaatctgtaa

SEQ ID NO: 349 - protein, 737 aa, Artificial Sequence
  Description of Artificial Sequence: Synthetic polypeptide
MAADGYLPDWLEDNLSEGIREWWALKPGAPQPKANQQHQDNARGLVLPGYKYLGPGNGLDKGEPVNAADAAALEHDKAYDQQLQAGDNPYLRYNHADAEFQERLQEDTSFGGNLGRAVFQAKKRILEPLGLVEEAAKTAPGKKRPVDQSPQEPDSSSGVGKSGKQPARKRLNFGQTGDSESVPDPQPLGEPPAAPTSLGSNTMASGGGAPMADNNEGADGVGSSSGNWHCDSQWLGDRVITTSTRTWALPTYNNHLYKQISNGTSGGATNDNTYFGYSTPWGYFDFNRFHCHFSPRDWQRLINNNWGFRPKRLSFKLFNIQVKEVTQNEGTKTIANNLTSTIQVFTDSEYQLPYVLGSAHQGCLPPFPADVFMVPQYGYLTLNNGSQAVGRSSFYCLEYFPSQMLRTGNNFTFSYTFEEVPFHSSYAHSQSLDRLMNPLIDQYLYYLSRTQTTGGTANTQTLGFSQGGPNTMANQAKNWLPGPCYRQQRVSTTTGQNNNSNFAWTAGTKYHLNGRNSLANPGIAMATHKDDEERFFPSNGILIFGKQNAARDNADYSDVMLTSEEEIKTTNPVATEEYGIVADNLQQQNTAPQIGTVNSQGDLPGMVWQNRDVYLQGPIWAKIPHTDGNFHPSPLMGGFGLKHPPPQILIKNTPVPADPPTTFNQSKLNSFITQYSTGQVSVEIEWELQKENSKRWNPEIQYTSNYYKSNNVEFAVNTEGVYSEPRPIGTRYLTRNL

SEQ ID NO: 350 - DNA, 2205 bp, Artificial Sequence
  Description of Artificial Sequence: Synthetic polynucleotide
atggctgctgacggttatcttccagattggctcgaggacaacctttctgaaggcattcgtgagtggtgggctctgaaacctggagtccctcaacccaaagcgaaccaacaacaccaggacaactgtcggggtcttgtgcttccgggttacaaatacctcggacccggtaacggactcgacaaaggagagccggtcaacgaggcggacgcggcagccctcgaacacgacaaggcctacgaccagcagctcaaggccggagacaacccgtacctcaagtacaaccacgccgacgccgagttccaggagcggctcaaagaagatacgtcttttgggggcaacctcgggcgagcagtcttccagaccaaaaagaggcttcttgaacctcttggtctggttgaggaagcggctaagacggctcctggaaagaagaggcctgtagagcagtctcctcaggaaccggactcctccgcgggtattggcaaatcgggtgcacagcccgctaaaaagagactcaatttcggtcagactggcgacacagagtcagtcccagaccctcaaccaatcggagaacctcccgcagccccctcaggtgtgggatctcttacaatggcttcaggtggtggcgcaccagtggcagacaataacgaaggtgccgatggagtgggtagttcctcgggaaattggcattgcgattcccaatggctgggggacagagtcatcaccaccagcacccgaacctgggccctgcccacctacaacaaccacctctacaaacaaatttccagccaatcaggagcctcgaacgacaatcactactttggctacagcaccccttgggggtattttgacttcaacagattccactgccacttttcaccacgtgactggcagcgactcatcaacaacaactggggattccggcccaagagactcagcttcaagctcttcaacatccaggtcaaagaggttacggacaacaatggagtcaagaccatcgccaataaccttaccagcacggtccaggtcttcacggactcagactatcagctcccgtacgtgctcgggtcggctcacgagggctgcctcccgccgttcccagcggacgttttcatgattcctcagtacgggtatctgacgcttaatgatggaagccaggccgtgggtcgttcgtccttttactgcctggaatatttcccgtcgcaaatgctaagaacgggtaacaacttccagttcagctacgagtttgagaacgtacctttccatagcagctacgctcacagccaaagcctggaccgactaatgaatccactcatcgaccaatacttgtactatctctcaaagactattaacggttctggacagaatcaacaaacgctaaaattcagtgtggccggacccagcaacatggctgtccagggaagaaactacatacctggacccagctaccgacaacaacgtgtctcaaccactgtgactcaaaacaacaacagcgaatttgcttggcctggagcttcttcttgggctctcaatggacgtaatagcttgatgaatcctggacctgctatggccagccacaaagaaggagaggaccgtttctttcctttgtctggatctttaatttttggcaaacaaggaactggaagagacaacgtggatgcggacaaagtcatgataaccaacgaagaagaaattaaaactactaacccggtagcaacggagtcctatggacaagtggccacaaaccaccagagtgcccaagcacaggcgcagaccggctgggttcaaaaccaaggaatacttccgggtatggtttggcaggacagagatgtgtacctgcaaggacccatctgggccaagattcctcacacggacggcaacttccacccgtctccgctgatgggcggctttggcctgaaacatcctccgcctcagatcctgatcaagaacacgcctgttcctgcgaatcctccggcggagttttcagctacaaagtttgcttcattcatcacccagtactccacaggacaagtgagtgtggaaattgaatgggagctgcagaaagaaaacagcaagcgctggaatcccgaagtgcagtacacatccaattatgcaaaatctgccaacgttgattttactgtggacaacaatggactttatactgagcctcgccccattggcacccgttaccttaccaaacctctgtaa

SEQ ID NO: 351 - protein, 734 aa, Artificial Sequence
  Description of Artificial Sequence: Synthetic polypeptide
MAADGYLPDWLEDNLSEGIREWWALKPGVPQPKANQQHQDNCRGLVLPGYKYLGPGNGLDKGEPVNEADAAALEHDKAYDQQLKAGDNPYLKYNHADAEFQERLKEDTSFGGNLGRAVFQTKKRLLEPLGLVEEAAKTAPGKKRPVEQSPQEPDSSAGIGKSGAQPAKKRLNFGQTGDTESVPDPQPIGEPPAAPSGVGSLTMASGGGAPVADNNEGADGVGSSSGNWHCDSQWLGDRVITTSTRTWALPTYNNHLYKQISSQSGASNDNHYFGYSTPWGYFDFNRFHCHFSPRDWQRLINNNWGFRPKRLSFKLFNIQVKEVTDNNGVKTIANNLTSTVQVFTDSDYQLPYVLGSAHEGCLPPFPADVFMIPQYGYLTLNDGSQAVGRSSFYCLEYFPSQMLRTGNNFQFSYEFENVPFHSSYAHSQSLDRLMNPLIDQYLYYLSKTINGSGQNQQTLKFSVAGPSNMAVQGRNYIPGPSYRQQRVSTTVTQNNNSEFAWPGASSWALNGRNSLMNPGPAMASHKEGEDRFFPLSGSLIFGKQGTGRDNVDADKVMITNEEEIKTTNPVATESYGQVATNHQSAQAQAQTGWVQNQGILPGMVWQDRDVYLQGPIWAKIPHTDGNFHPSPLMGGFGLKHPPPQILIKNTPVPANPPAEFSATKFASFITQYSTGQVSVEIEWELQKENSKRWNPEVQYTSNYAKSANVDFTVDNNGLYTEPRPIGTRYLTKPL

SEQ ID NO: 352 - DNA, 2211 bp, Artificial Sequence
  Description of Artificial Sequence: Synthetic polynucleotide
atggctgccgatggttatcttccagattggctcgaggacaacctctctgagggcattcgcgagtggtgggacttgaaacctggagcccctaaacccaaggcaaatcaacaacatcaggacaacgctcgaggtcttgtgcttccgggttacaaataccttggacccggcaacggactcgacaagggggagccggtcaacgcagcagacgcggcggccctcgagcacgacaaggcctacgaccagcagctcaaggccggagacaacccgtacctcaagtacaaccacgccgacgccgagttccaggagcggctcaaagaagatacgtcttttgggggcaacctcgggcgagcagtcttccaggccaaaaagaggcttcttgaacctcttggtctggttgaggaagcggctaagacggctcctggaaagaagagaccggtagagccatcaccccagcgttctccagactcctctacgggcatcggcaagaaaggccaacagcccgctaaaaagagactcaattttggtcagactggcgactcagagtcagtccccgacccacaacctctcggagaacctccagcaacccccgctgctgtgggacctactacaatggcttcaggcggtggcgcaccaatggcagacaataacgagggtgccgatggagtgggtaattcctcaggaaattggcattgcgattcccaatggctgggcgacagagtcatcaccaccagcaccagaacctgggccctgcccacttacaacaaccatctctacaagcaaatctccagccaatcaggagcttcaaacgacaaccactactttggctacagcaccccttgggggtattttgactttaacagattccactgccacttttcaccacgtgactggcaaagactcatcaacaacaactggggattccgacccaagagactcaacttcaagctcttcaacatccaagtcaaggaggtcacgacgaatgatggcgtcacgaccatcgctaataaccttaccagcacggttcaagtcttctcggactcggagtaccagttgccgtacgtcctcggctctgcgcaccagggctgcctccctccgttcccggcggacgtgttcatgattccgcagtacggctacctaacgctcaacaatggcagccaagccgtgggacgttcatccttttactgcctggaatatttcccttctcagatgctgagaacgggcaacaactttaccttcagctacacttttgaggacgttcctttccacagcagctacgctcacagccagagtctggaccgtctcatgaatcctctcatcgaccagtacctgtattacttgagcagaacaaacactccaagtggaaccaccacgcagtcaaggcttcagttttctcaggccggagcgagtgacattcgggaccagtctaggaactggcttcctggaccctgttaccgccagcagcgcgtttctaaaacaaaaacagacaacaacaacagcaattttacctggactggtgcttcaaaatataaccttaatgggcgtgaatctataatcaaccctggcactgctatggcctcacacaaagacgacgaagacaagttctttcccatgagcggtgtcatgatttttggaaaagagagcgccggagcttcaaacactgcattggacaatgtcatgatcacagacgaagaggaaatcaaagccactaaccccgtggccaccgaaagatttgggactgtggcagtcaatctccagagcagcagcacagaccctgcgaccggagatgtgcatgttatgggagcattacctggcatggtgtggcaagatagagacgtgtacctgcagggtcccatttgggccaaaattcctcacacagatggacactttcacccgtctcctcttatgggcggctttggactcaagaacccgcctcctcagatcctcatcaaaaacacgcctgttcctgcgaatcctccggcggagttttcagctacaaagtttgcttcattcatcacccaatactccacaggacaagtgagtgtggaaattgaatgggagctgcagaaagaaaacagcaagcgctggaatcccgaagtgcagtacacatccaattatgcaaaatctgccaacgttgattttactgtggacaacaatggactttatactgagcctcgccccattggcacccgttaccttacccgtcccctgtaa

SEQ ID NO: 353 - protein, 736 aa, Artificial Sequence
  Description of Artificial Sequence: Synthetic polypeptide
MAADGYLPDWLEDNLSEGIREWWDLKPGAPKPKANQQHQDNARGLVLPGYKYLGPGNGLDKGEPVNAADAAALEHDKAYDQQLKAGDNPYLKYNHADAEFQERLKEDTSFGGNLGRAVFQAKKRLLEPLGLVEEAAKTAPGKKRPVEPSPQRSPDSSTGIGKKGQQPAKKRLNFGQTGDSESVPDPQPLGEPPATPAAVGPTTMASGGGAPMADNNEGADGVGNSSGNWHCDSQWLGDRVITTSTRTWALPTYNNHLYKQISSQSGASNDNHYFGYSTPWGYFDFNRFHCHFSPRDWQRLINNNWGFRPKRLNFKLFNIQVKEVTTNDGVTTIANNLTSTVQVFSDSEYQLPYVLGSAHQGCLPPFPADVFMIPQYGYLTLNNGSQAVGRSSFYCLEYFPSQMLRTGNNFTFSYTFEDVPFHSSYAHSQSLDRLMNPLIDQYLYYLSRTNTPSGTTTQSRLQFSQAGASDIRDQSRNWLPGPCYRQQRVSKTKTDNNNSNFTWTGASKYNLNGRESIINPGTAMASHKDDEDKFFPMSGVMIFGKESAGASNTALDNVMITDEEEIKATNPVATERFGTVAVNLQSSSTDPATGDVHVMGALPGMVWQDRDVYLQGPIWAKIPHTDGHFHPSPLMGGFGLKNPPPQILIKNTPVPANPPAEFSATKFASFITQYSTGQVSVEIEWELQKENSKRWNPEVQYTSNYAKSANVDFTVDNNGLYTEPRPIGTRYLTRPL

SEQ ID NO: 354 - DNA, 2214 bp, Artificial Sequence; identical to SEQ ID NO: 326
  Description of Artificial Sequence: Synthetic polynucleotide

SEQ ID NO: 355 - protein, 737 aa, Artificial Sequence; identical to SEQ ID NO: 327
  Description of Artificial Sequence: Synthetic polypeptide

SEQ ID NO: 356 - DNA, 2205 bp, Artificial Sequence
  Description of Artificial Sequence: Synthetic polynucleotide
atggctgctgacggttatcttccagattggctcgaggacaacctttctgaaggcattcgtgagtggtgggctctgaaacctggagtccctcaacccaaagcgaaccaacaacaccaggacaaccgtcggggtcttgtgcttccgggttacaaatacctcggacccggtaacggactcgacaaaggagagccggtcaacgaggcggacgcggcagccctcgaacacgacaaggcctacgaccagcagctcaaggccggagacaacccgtacctcaagtacaaccacgccgacgccgagttccaggagcggctcaaagaagatacgtcttttgggggcaacctcgggcgagcagtcttccaggccaaaaagaggcttcttgaacctcttggtctggttgaggaagcggctaagacggctcctggaaagaagaggcctgtagagcagtctcctcaggaaccggactcctccgcgggtattggcaaatcgggtgcacagcccgctaaaaagagactcaatttcggtcagactggcgacacagagtcagtcccagaccctcaaccaatcggagaacctcccgcagccccctcaggtgtgggatctcttacaatggcttcaggtggtggcgcaccagtggcagacaataacgaaggtgccgatggagtgggtagttcctcgggaaattggcattgcgattcccaatggctgggggacagagtcatcaccaccagcacccgaacctgggccctgcccacctacaacaaccacctctacaaacaaatttccagccaatcaggagcctcgaacgacaatcactactttggctacagcaccccttgggggtattttgacttcaacagattccactgccacttttcaccacgtgactggcagcgactcatcaacaacaactggggattccggcccaagagactcagcttcaagctcttcaacatccaggtcaaagaggttacggacaacaatggagtcaagaccatcgccaataaccttaccagcacggtccaggtcttcacggactcagactatcagctcccgtacgtgctcgggtcggctcacgagggctgcctcccgccgttcccagcggacgttttcatgattcctcagtacgggtatctgacgcttaatgatggaagccaggccgtgggtcgttcgtccttttactgcctggaatatttcccgtcgcaaatgctaagaacgggtaacaacttccagttcagctacgagtttgagaacgtacctttccatagcagctacgctcacagccaaagcctggaccgactaatgaatccactcatcgaccaatacttgtactatctctcaaagactattaacggttctggacagaatcaacaaacgctaaaattcagtgtggccggacccagcaacatggctgtccagggaagaaactacatacctggacccagctaccgacaacaacgtgtctcaaccactgtgactcaaaacaacaacagcgaatttgcttggcctggagcttcttcttgggctctcaatggacgtaatagcttgatgaatcctggacctgctatggccagccacaaagaaggagaggaccgtttctttcctttgtctggatctttaatttttggcaaacaaggaactggaagagacaacgtggatgcggacaaagtcatgataaccaacgaagaagaaattaaaactactaacccggtagcaacggagtcctatggacaagtggccacaaaccaccagagtgcccaagcacaggcgcagaccggctgggttcaaaaccaaggaatacttccgggtatggtttggcaggacagagatgtgtacctgcaaggacccatttgggccaaaattcctcacacggacggcaactttcacccttctccgctgatgggagggtttggaatgaaacacccgcctcctcagatcctcatcaaaaacacacctgtacctgcggatcctccaacggccttcaacaaggacaagctgaactctttcatcacccagtattctactggccaagtcagcgtggagatcgagtgggagctgcagaaggaaaacagcaagcgctggaaccccgagatccagtacacctccaactactacaaatctacaagtgtggactttgctgttaatacagaaggcgtgtactctgaaccccgccccattggcacccgttacctcacccgtaatctgtaa

SEQ ID NO: 357 - protein, 734 aa, Artificial Sequence
  Description of Artificial Sequence: Synthetic polypeptide
MAADGYLPDWLEDNLSEGIREWWALKPGVPQPKANQQHQDNRRGLVLPGYKYLGPGNGLDKGEPVNEADAAALEHDKAYDQQLKAGDNPYLKYNHADAEFQERLKEDTSFGGNLGRAVFQAKKRLLEPLGLVEEAAKTAPGKKRPVEQSPQEPDSSAGIGKSGAQPAKKRLNFGQTGDTESVPDPQPIGEPPAAPSGVGSLTMASGGGAPVADNNEGADGVGSSSGNWHCDSQWLGDRVITTSTRTWALPTYNNHLYKQISSQSGASNDNHYFGYSTPWGYFDFNRFHCHFSPRDWQRLINNNWGFRPKRLSFKLFNIQVKEVTDNNGVKTIANNLTSTVQVFTDSDYQLPYVLGSAHEGCLPPFPADVFMIPQYGYLTLNDGSQAVGRSSFYCLEYFPSQMLRTGNNFQFSYEFENVPFHSSYAHSQSLDRLMNPLIDQYLYYLSKTINGSGQNQQTLKFSVAGPSNMAVQGRNYIPGPSYRQQRVSTTVTQNNNSEFAWPGASSWALNGRNSLMNPGPAMASHKEGEDRFFPLSGSLIFGKQGTGRDNVDADKVMITNEEEIKTTNPVATESYGQVATNHQSAQAQAQTGWVQNQGILPGMVWQDRDVYLQGPIWAKIPHTDGNFHPSPLMGGFGMKHPPPQILIKNTPVPADPPTAFNKDKLNSFITQYSTGQVSVEIEWELQKENSKRWNPEIQYTSNYYKSTSVDFAVNTEGVYSEPRPIGTRYLTRNL

SEQ ID NO: 358 - DNA, 2217 bp, Artificial Sequence
  Description of Artificial Sequence: Synthetic polynucleotide
atggctgccgatggttatcttccagattggctcgaggacaacctctctgagggcattcgcgagtggtgggcgctgaaacctggagccccgaagcccaaagccaaccagcaaaagcaggacgacggccggggtctggtgcttcctggctacaagtacctcggacccttcaacggactcgacaagggggagcccgtcaacgcggcggacgcagcggccctcgagcacgacaaggcctacgaccagcagctgcaggcgggtgacaatccgtacctgcggtataaccacgccgacgccgagtttcaggagcgtctgcaagaagatacgtcttttgggggcaacctcgggcgagcagtcttccaggccaagaagcgggttctcgaacctctcggtctggttgaggaaggcgctaagacggctcctggaaagaagagaccggtagagccatcaccccagcgttctccagactcctctacgggcatcggcaagaaaggccaacagcccgccagaaaaagactcaattttggtcagactggcgactcagagtcagttccagaccctcaacctctcggagaacctccagcagcgccctctggtgtgggacctaatacaatggctgcaggcggtggcgcaccaatggcagacaataacgaaggcgccgacggagtgggtagttcctcgggaaattggcattgcgattccacatggctgggcgacagagtcatcaccaccagcacccgaacctgggccctgcccacctacaacaaccacctctacaagcaaatctccaacgggacatcgggaggagccaccaacgacaacacctacttcggctacagcaccccctgggggtattttgactttaacagattccactgccacttttcaccacgtgactggcagcgactcatcaacaacaactggggattccggcccaagagactcagcttcaagctcttcaacatccaggtcaaggaggtcacgcagaatgaaggcaccaagaccatcgccaataacctcaccagcaccatccaggtgtttacggactcggagtaccagctgccgtacgttctcggctctgcccaccagggctgcctgcctccgttcccggcggacgtgttcatgattccccagtacggctacctaacactcaacaacggtagtcaggccgtgggacgctcctccttctactgcctggaatactttccttcgcagatgctgagaaccggcaacaacttccagtttacttacaccttcgaggacgtgcctttccacagcagctacgcccacagccagagcttggaccggctgatgaatcctctgattgaccagtacctgtactacttgtctcggactcaaacaacaggaggcacggcaaatacgcagactctgggcttcagccaaggtgggcctaatacaatggccaatcaggcaaagaactggctgccaggaccctgttaccgccaacaacgcgtctcaacgacaaccgggcaaaacaacaatagcaactttgcctggactgctgggaccaaataccatctgaatggaagaaattcattggctaatcctggcatcgctatggcaacacacaaagacgacgaggagcgtttttttcccagtaacgggatcctgatttttggcaaacaaaatgctgccagagacaatgcggattacagcgatgtcatgctcaccagcgaggaagaaatcaaaaccactaaccctgtggctacagaggaatacggtatcgtggcagataacttgcagcagcaaaacacggctcctcaaattggaactgtcaacagccagggggccttacccggtatggtctggcagaaccgggacgtgtacctgcagggtcccatctgggccaagattcctcacacggacggcaacttccacccctctcccctcatgggtggattcggacttaaacatcctccgcctcagatcctgatcaagaacacgcctgtacctgcggatcctccgaccaccttcaaccagtcaaagctgaactctttcatcacgcaatacagcaccggacaggtcagcgtggaaattgaatgggagctgcagaaggaaaacagcaagcgctggaaccccgagatccagtacacctccaactactacaaatctacaagtgtggactttgctgttaatacagaaggcgtgtactctgaaccccgccccattggcacccgttacctcacccgtaatctgtaa

SEQ ID NO: 359 - protein, 738 aa, Artificial Sequence; identical to SEQ ID NO: 105
  Description of Artificial Sequence: Synthetic polypeptide

SEQ ID NO: 360 - DNA, 2211 bp, Artificial Sequence
  Description of Artificial Sequence: Synthetic polynucleotide
atggctgctgacggttatcttccagattggctcgaggacaacctttctgaaggcattcgagagtggtgggcgctgcaacctggagcccctaaacccaaggcaaatcaacaacatcaggacaacgctcggggtcttgtgcttccgggttacaaatacctcggacccggcaacggactcgacaagggggaacccgtcaacgcagcggacgcggcagccctcgagcacgacaaggcctacgaccagcagctcaaggccggtgacaacccctacctcaagtacaaccacgccgacgccgagttccaggagcggctcaaagaagatacgtcttttgggggcaacctcgggcgagcagtcttccaggccaaaaagaggcttcttgaacctcttggtctggttgaggaagcggctaagacggctcctggaaagaagaggcctgtagatcagtctcctcaggaaccggactcatcatctggtgttggcaaatcgggcaaacagcctgccagaaaaagactaaatttcggtcagactggcgactcagagtcagtcccagaccctcaacctctcggagaaccaccagcagcccccacaagtttgggatctaatacaatggcttcaggcggtggcgcaccaatggcagacaataacgagggtgccgatggagtgggtaattcctcaggaaattggcattgcgattcccaatggctgggcgacagagtcatcaccaccagcaccagaacctgggccctgcccacttacaacaaccatctctacaagcaaatctccagccaatcaggagcttcaaacgacaaccactactttggctacagcaccccttgggggtattttgactttaacagattccactgccacttctcaccacgtgactggcagcgactcattaacaacaactggggattccggcccaagaaactcagcttcaagctcttcaacatccaagttaaagaggtcacgcagaacgatggcacgacgactattgccaataaccttaccagcacggttcaggtgtttacggactcggagtatcagctcccgtacgtgctcgggtcggcgcaccaaggctgtctcccgccgtttccagcggacgtcttcatggtccctcagtatggatacctcaccctgaacaacggaagtcaagcggtgggacgctcatccttttactgcctggagtacttcccttcgcagatgctaaggactggaaataacttccaattcagctataccttcgaggatgtaccttttcacagcagctacgctcacagccagagtttggatcgcttgatgaatcctcttattgatcagtatctgtactacctgaacagaacgcaaggaacaacctctggaacaaccaaccaatcacggctgctttttagccaggctgggcctcagtctatgtctttgcaggccagaaattggctacctgggccctgctaccggcaacagagactttcaaagactgctaacgacaacaacaacagtaactttccttggacagcggccagcaaatatcatctcaatggccgcgactcgctggtgaatccaggaccagctatggccagtcacaaggacgatgaagaaaaatttttccctatgcacggcaatctaatatttggcaaagaagggacaacggcaagtaacgcagaattagataatgtaatgattacggatgaagaagagattcgtaccaccaatcctgtggcaacagagcagtatggaactgtggcaaataacttgcagagctcaaatacagctcccacgactagaactgtcaatgatcagggggccttacctggcatggtgtggcaagatcgtgacgtgtaccttcaaggacctatctgggcaaagattcctcacacggatggacactttcatccttctcctctgatgggaggctttggactgaaacatccgcctcctcaaatcatgatcaaaaatactccggtaccggcaaatcctccgacgactttcagcccggccaagtttgcttcatttatcactcagtactccactggacaggtcagcgtggaaattgagtgggagctacagaaagaaaacagcaaacgttggaatccagagattcagtacacttccaactacaacaagtctgttaatgtggactttactgtagacactaatggtgtttatagtgaacctcgccccattggcacccgttaccttacccgtcccctgtaa

SEQ ID NO: 361 - protein, 736 aa, Artificial Sequence; identical to SEQ ID NO: 331
  Description of Artificial Sequence: Synthetic polypeptide

SEQ ID NO: 362 - DNA, 2211 bp, Artificial Sequence; identical to SEQ ID NO: 330
  Description of Artificial Sequence: Synthetic polynucleotide

SEQ ID NO: 363 - protein, 736 aa, Artificial Sequence; identical to SEQ ID NO: 331
  Description of Artificial Sequence: Synthetic polypeptide

SEQ ID NO: 364 - DNA, 2211 bp, Artificial Sequence
  Description of Artificial Sequence: Synthetic polynucleotide
atggctgctgacggttatcttccagattggctcgaggacaacctttctgaaggcattcgtgagtggtgggctctgaaacctggagtccctcaacccaaagcgaaccaacaacaccaggacaaccgtcggggtcttgtgcttccgggttacaaatacctcggacccggtaacggactcgacaaaggagagcccgtcaacgcggcggatgcagcggccctcgagcacgacaaggcctacgaccagcagctcaaagcgggtgacaatccgtacctgcggtataaccacgccgacgccgagtttcaggagcgtctgcaagaagatacgtcttttgggggcaacctcgggcgagcagtcttccaggccaagaagagggttctcgaaccttttggtctggttgaggaaggtgctaagacggctcctggaaagaaacgtccggtagagcagtcgccacaagagccagactcctcctcgggcatcggcaagacaggccagcagcccgctaaaaagagactcaattttggtcagactggcgactcagagtcagtccccgacccacaacctctcggagaacctccagcaacccccgctgctgtgggacctactacaatggcttcaggcggtggcgcaccaatggcagacaataacgaaggcgccgacggagtgggtaatgcctcaggaaattggcattgcgattccacatggctgggcgacagagtcatcaccaccagcacccgcacctgggccttgcccacctacaataaccacctctacaagcaaatctccagtgcttcaacgggggccagcaacgacaaccactacttcggctacagcaccccctgggggtattttgatttcaacagattccactgccatttctcaccacgtgactggcagcgactcatcaacaacaattggggattccggcccaagagactcaacttcaagctcttcaacatccaagtcaaggaggtcacgacgaatgatggcgtcacgaccatcgctaataaccttaccagcacggttcaagtcttctcggactcggagtaccagcttccgtacgtcctcggctctgcgcaccagggctgcctccctccgttcccggcggacgtgttcatgattccgcaatacggctacctgacgctcaacaatggcagccaagccgtgggacgttcatccttttactgcctggaatatttcccttctcagatgctgagaacgggcaacaactttaccttcagctacacctttgaggaagtgcctttccacagcagctacgcgcacagccagagcctggaccggctgatgaatcctctcatcgaccaatacctgtattacctgaacagaactcaaaatcagtccggaagtgcccaaaacaaggacttgctgtttagccgtgggtctccagctggcatgtctgttcagcccaaaaactggctacctggaccctgttatcggcagcagcgcgtttctaaaacaaaaacagacaacaacaacagcaattttacctggactggtgcttcaaaatataacctcaatgggcgtgaatccatcatcaaccctggcactgctatggcctcacacaaagacgacgaagacaagttctttcccatgagcggtgtcatgatttttggaaaagagagcgccggagcttcaaacactgcattggacaatgtcatgattacagacgaagaggaaattaaagccactaaccctgtggccaccgaaagatttgggaccgtggcagtcaatttccagagcagcagcacagaccctgcgaccggagatgtgcatgttatgggagccttacctggaatggtgtggcaagacagagacgtatacctgcagggtcctatttgggccaaaattcctcacacggatggacactttcacccgtctcctctcatgggcggctttggacttaagcacccgcctcctcagatcctcatcaaaaacacgcctgttcctgcgaatcctccggcagagttttcggctacaaagtttgcttcattcatcacccagtattccacaggacaagtgagcgtggagattgaatgggagctgcagaaagaaaacagcaaacgctggaatcccgaagtgcagtatacatctaactatgcaaaatctgccaacgttgatttcactgtggacaacaatggactttatactgagcctcgccccattggcacccgttacctcacccgtcccctgtaa

SEQ ID NO: 365 - protein, 736 aa, Artificial Sequence
  Description of Artificial Sequence: Synthetic polypeptide
MAADGYLPDWLEDNLSEGIREWWALKPGVPQPKANQQHQDNRRGLVLPGYKYLGPGNGLDKGEPVNAADAAALEHDKAYDQQLKAGDNPYLRYNHADAEFQERLQEDTSFGGNLGRAVFQAKKRVLEPFGLVEEGAKTAPGKKRPVEQSPQEPDSSSGIGKTGQQPAKKRLNFGQTGDSESVPDPQPLGEPPATPAAVGPTTMASGGGAPMADNNEGADGVGNASGNWHCDSTWLGDRVITTSTRTWALPTYNNHLYKQISSASTGASNDNHYFGYSTPWGYFDFNRFHCHFSPRDWQRLINNNWGFRPKRLNFKLFNIQVKEVTTNDGVTTIANNLTSTVQVFSDSEYQLPYVLGSAHQGCLPPFPADVFMIPQYGYLTLNNGSQAVGRSSFYCLEYFPSQMLRTGNNFTFSYTFEEVPFHSSYAHSQSLDRLMNPLIDQYLYYLNRTQNQSGSAQNKDLLFSRGSPAGMSVQPKNWLPGPCYRQQRVSKTKTDNNNSNFTWTGASKYNLNGRESIINPGTAMASHKDDEDKFFPMSGVMIFGKESAGASNTALDNVMITDEEEIKATNPVATERFGTVAVNFQSSSTDPATGDVHVMGALPGMVWQDRDVYLQGPIWAKIPHTDGHFHPSPLMGGFGLKHPPPQILIKNTPVPANPPAEFSATKFASFITQYSTGQVSVEIEWELQKENSKRWNPEVQYTSNYAKSANVDFTVDNNGLYTEPRPIGTRYLTRPL

SEQ ID NO: 366 - DNA, 2217 bp, Artificial Sequence
  Description of Artificial Sequence: Synthetic polynucleotide
atggctgccgatggttatcttccagattggctcgaggacaacctctctgagggcattcgcgagtggtgggacttgaaacctggagccccgaaacccaaagccaaccagcaaaagcaggacgacggccggggtctggtgcttcctggctacaagtacctcggacccttcaacggactcgacaagggggagcccgtcaacgcggcggatgcaacggccctcgagcacgacaaggcctacgaccagcagctgcaggcgggtgacaatccgtacctgcggtataaccacgccgacgccgagtttcaggagcgtctgcaagaagatacgtcttttgggggcaacctcgggcgagcagtcttccaggccaagaagcgggttctcgaacctctcggtctggttgaggaaggcgctaagacggctcctggaaagaagagaccggtagagccatcaccccagcgttctccagactcctctacgggcatcggcaagaaaggccaacagcccgccagaaaaagactcaattttggtcagactggcgactcagagtcagttccagaccctcaacctctcggagaaccaccagcagcccccacaagtttgggatctaatacaatggcttcaggcggtggcgcaccaatggcagacaataacgagggtgccgatggagtgggtaattcctcaggaaattggcattgcgattcccaatggctgggcgacagagtcatcaccaccagcacccgcacctgggccttgcccacctacaataaccacctctacaagcaaatctccagtgcttcaacgggggccagcaacgacaaccactacttcggctacagcaccccctgggggtattttgactttaaccgcttccactgccacttctcgccaagagactggcaaagactcatcaacaacaattggggattccggcccaagagactcaacttcaaactcttcaacatccaagtcaaggaggtcacgacgaatgatggcgtcacgaccatcgccaataacctcaccagcaccatccaggtgtttacggactcggagtaccagctgccgtacgttctcggctctgcccaccagggctgcctgcctccgttcccggcggacgtgttcatgattccccagtatggatacctcaccctgaacaacggaagtcaagcggtgggacgctcatccttttactgcctggagtacttcccttcgcagatgctaaggactggaaataacttccaattcagctataccttcgaggatgtaccttttcacagcagctacgctcacagccagagtttggatcgcttgatgaatcctcttattgatcagtatctgtactacctgaacagaacgcaaggaacaacctctggaacaaccaaccaatcacggctgctttttagccaggctgggcctcagtctatgtctttgcaggccagaaattggctacctgggccctgctaccggcaacagagactttcaaagactgctaacgacaacaacaacagtaactttccttggacagcagccagcaaatatcatctcaatggccgcgactcgctggtgaatccaggaccagctatggccagtcacaaggacgatgaagaaaaatttttccctatgcacggcaatctaatatttggcaaagaagggacaacggcaagtaacgcagaattagataatgtaatgattacggatgaagaagagattcgtaccaccaatcctgtggcaacagagcagtatggaactgtggcaaataacttgcagagctcaaatacagctcccacgactagaactgtcaatgatcagggggccttacctggcatggtgtggcaagatcgtgacgtgtaccttcaggggcccatctgggcaaagattccacacacggacggacattttcacccctctcccctcatgggtggattcggacttaaacaccctcctccgcagattctcatcaagaacaccccggtacctgcgaatccttcgaccaccttcagtgcggcaaagtttgcttccttcatcacacagtactccacgggacaggtcagcgtggagatcgagtgggagctgcagaaggaaaacagcaagcgctggaacccggagatccagtacacttccaactattacaagtctaataatgttgaatttgctgttaatactgaaggtgtatatagtgaaccccgccccattggcaccagatacctgactcgtaatctgtaa

SEQ ID NO: 367 - protein, 738 aa, Artificial Sequence
  Description of Artificial Sequence: Synthetic polypeptide
MAADGYLPDWLEDNLSEGIREWWDLKPGAPKPKANQQKQDDGRGLVLPGYKYLGPFNGLDKGEPVNAADATALEHDKAYDQQLQAGDNPYLRYNHADAEFQERLQEDTSFGGNLGRAVFQAKKRVLEPLGLVEEGAKTAPGKKRPVEPSPQRSPDSSTGIGKKGQQPARKRLNFGQTGDSESVPDPQPLGEPPAAPTSLGSNTMASGGGAPMADNNEGADGVGNSSGNWHCDSQWLGDRVITTSTRTWALPTYNNHLYKQISSASTGASNDNHYFGYSTPWGYFDFNRFHCHFSPRDWQRLINNNWGFRPKRLNFKLFNIQVKEVTTNDGVTTIANNLTSTIQVFTDSEYQLPYVLGSAHQGCLPPFPADVFMIPQYGYLTLNNGSQAVGRSSFYCLEYFPSQMLRTGNNFQFSYTFEDVPFHSSYAHSQSLDRLMNPLIDQYLYYLNRTQGTTSGTTNQSRLLFSQAGPQSMSLQARNWLPGPCYRQQRLSKTANDNNNSNFPWTAASKYHLNGRDSLVNPGPAMASHKDDEEKFFPMHGNLIFGKEGTTASNAELDNVMITDEEEIRTTNPVATEQYGTVANNLQSSNTAPTTRTVNDQGALPGMVWQDRDVYLQGPIWAKIPHTDGHFHPSPLMGGFGLKHPPPQILIKNTPVPANPSTTFSAAKFASFITQYSTGQVSVEIEWELQKENSKRWNPEIQYTSNYYKSNNVEFAVNTEGVYSEPRPIGTRYLTRNL

SEQ ID NO: 368 - DNA, 2208 bp, Artificial Sequence
  Description of Artificial Sequence: Synthetic polynucleotide
atggctgccgatggttatcttccagattggctcgaggacaaccttagtgaaggaattcgcgagtggtgggacttgaaacctggagccccgaagcccaaagccaaccagcaaaagcaggacgacggccggggtctggtgcttcctggctacaagtacctcggacccttcaacggactcgacaagggggagcccgtcaacgcggcggacgcagcggccctcgagcacgacaaggcctacgaccagcagctcaaagcgggtgacaatccgtacctgcggtataaccacgccgacgccgagtttcaggagcgtctgcaagaagatacgtcttttgggggcaacctcgggcgagcagtcttccaggccaagaagcgggttctcgaacctctcggtctggttgaggaaggtgctaagacggctcctggaaagaaacgtccggtagagcagtcgccacaagagccagactcctcctcgggcattggcaagacaggccagcagcccgctaaaaagagactcaattttggtcagactggcgactcagagtcagtccccgacccacaacctctcggagaacctccagcaacccccgctgctgtgggacctactacaatggcttcaggcggtggcgcaccaatggcagacaataacgaaggcgccgacggagtgggtaatgcctcaggaaattggcattgcgattccacatggctgggcgacagagtcatcaccaccagcacccgaacctgggccctgcccacctacaacaaccacctctacaaacaaatttccagccaatcaggagcctcgaacgacaatcactactttggctacagcaccccttgggggtattttgatttcaacagattccactgccacttttcaccacgtgactggcagcgactcatcaacaacaattggggattccggcccaagagactcagcttcaagctcttcaacatccaggtcaaggaggtcacgcagaatgaaggcaccaagaccatcgccaataaccttaccagcacggttcaagtgtttacggactcggagtatcagctcccgtacgtgctcggctcggcgcatcaaggatgcctcccgccgttcccagcagacgtcttcatggtgccacagtatggatacctcaccctgaacaacgggagtcaggcagtaggacgctcttcattttactgcctggagtactttccttctcagatgctgcgtaccggaaacaactttaccttcagctacacttttgaggacgttcctttccacagcagctacgctcacagccagagtctggaccgtctcatgaatcctctgattgaccagtacctgtattacttgagcagaacaaacactccaagtggaaccaccacgcagtcaaggcttcagttttctcaggccggagcgagtgacattcgggaccagtctaggaactggcttcctggaccctgttaccgccagcagcgagtatcaaagacatctgcggataacaacaacagtgaatactcgtggactggagctaccaagtaccacctcaatggcagagactctctggtgaatccgggcccggccatggcaagccacaaggactatgaagaaaagttttttcctcagagcggggttctcatctttgggaagcaaggctcagagaaaacaaatgtggacattgaaaaggtcatgattacagacgaagaggaaatcaggacaaccaatcccgtggctacggagcagtatggttctgtatctaccaacctccagagaggcaacagacaagcagctaccgcagatgtcaacacacaaggcgttcttccaggcatggtctggcaggacagagatgtgtaccttcaggggcccatctgggcaaagattccacacacggacggacattttcacccgtctccgctgatgggcggctttggcctgaaacatcctccgcctcagatcctgatcaagaacacgcctgtacctgcggatcctccgaccaccttcaaccagtcaaagctgaactctttcatcactcagtattctactggccaagtcagcgtggagatcgagtgggagctgcagaaggaaaacagcaagcgctggaaccccgagatccagtacacctccaactactacaaatctacaagtgtggactttgctgttaatacagaaggcgtgtactctgaaccccgccccattggcacccgttacctcacccgtaatctgtaa

SEQ ID NO: 369 - protein, 735 aa, Artificial Sequence
  Description of Artificial Sequence: Synthetic polypeptide
MAADGYLPDWLEDNLSEGIREWWDLKPGAPKPKANQQKQDDGRGLVLPGYKYLGPFNGLDKGEPVNAADAAALEHDKAYDQQLKAGDNPYLRYNHADAEFQERLQEDTSFGGNLGRAVFQAKKRVLEPLGLVEEGAKTAPGKKRPVEQSPQEPDSSSGIGKTGQQPAKKRLNFGQTGDSESVPDPQPLGEPPATPAAVGPTTMASGGGAPMADNNEGADGVGNASGNWHCDSTWLGDRVITTSTRTWALPTYNNHLYKQISSQSGASNDNHYFGYSTPWGYFDFNRFHCHFSPRDWQRLINNNWGFRPKRLSFKLFNIQVKEVTQNEGTKTIANNLTSTVQVFTDSEYQLPYVLGSAHQGCLPPFPADVFMVPQYGYLTLNNGSQAVGRSSFYCLEYFPSQMLRTGNNFTFSYTFEDVPFHSSYAHSQSLDRLMNPLIDQYLYYLSRTNTPSGTTTQSRLQFSQAGASDIRDQSRNWLPGPCYRQQRVSKTSADNNNSEYSWTGATKYHLNGRDSLVNPGPAMASHKDYEEKFFPQSGVLIFGKQGSEKTNVDIEKVMITDEEEIRTTNPVATEQYGSVSTNLQRGNRQAATADVNTQGVLPGMVWQDRDVYLQGPIWAKIPHTDGHFHPSPLMGGFGLKHPPPQILIKNTPVPADPPTTFNQSKLNSFITQYSTGQVSVEIEWELQKENSKRWNPEIQYTSNYYKSTSVDFAVNTEGVYSEPRPIGTRYLTRNL

SEQ ID NO: 370 - DNA, 2214 bp, Artificial Sequence
  Description of Artificial Sequence: Synthetic polynucleotide
atggctgccgatggttatcttccagattggctcgaggacaacctctctgagggcattcgcgagtggtgggacttgaaacctggagccccgaaacccaaagccaaccagcaaaagcaggacgacggccggggtctggtgcttcctggctacaagtacctcggacccttcaacggactcgacaagggggagcccgtcaacgcggcggatgcagcggccctcgagcacgacaaggcctacgaccagcagctcaaagcgggtgacaatccgtacctgcggtataaccacgccgacgccgagtttcaggagcgtctgcaagaagatacgtcttttgggggcaacctcgggcgagcagtcttccaggccaagaagagggttctcgaaccttttggtctggttgaggaaggtgctaagacggctcctggaaagaaacgtccggtagagcagtcgccacaagagccagactcctcctcgggcattggcaagacaggccagcagcctgcaagaaaaagattgaattttggtcagactggagacgcagactcagtacctgacccccagcctctcggacagccaccagcagccccctctggtctgggaactaatacgatggctacaggcagtggcgcaccaatggcagacaataacgagggcgccgacggagtgggtaattcctcgggaaattggcattgcgattcccaatggctgggggacagagtcatcaccaccagcacccgaacctgggccctgcccacctacaacaatcacctctacaagcaaatctccaacagcacatctggaggatcttcaaatgacaacgcctacttcggctacagcaccccctgggggtattttgatttcaacagattccactgccatttctcaccacgtgactggcagcgactcatcaacaacaattggggattccggcccaagagactcaacttcaagctcttcaacatccaggtcaaggaggtcacgcagaatgaaggcaccaagaccatcgccaataacctcaccagcaccatccaggtgtttacggactcggagtaccagctgccgtacgttctcggctctgcccaccagggctgcctgcctccgttcccggcggacgtgttcatgattccccagtacggctacctaacactcaacaacggtagtcaggccgtgggacgctcctccttctactgcctggaatactttccttcgcagatgctgagaaccggcaacaacttccagtttacttacaccttcgaggacgtgcctttccacagcagctacgcccacagccagagcttggaccggctgatgaatcctctgattgaccagtacctgtactacttgtctcggactcaaacaacaggaggcacgacaaatacgcagactctgggcttcagccaaggtgggcctaatacaatggccaatcaggcaaagaactggctgccaggaccctgttaccgccagcagcgagtatcaaagacatttgcggataacaacaacagtgaatactcgtggactggagctaccaagtaccacctcaatggcagagactctctggtgaatccgggcccggccatggcaagccacaaggacgatgaagaaaagttttttcctcagagcggggttctcatctttgggaagcaaggctcagagaaaacaaatgtggacattgaaaaggtcatgattacagacgaagaggaaatcaggacaaccaatcccgtggctacggagcagtatggttctgtatctaccaacctccagagaggcaacagacaagcagctaccgcagatgtcaacacacaaggcgttcttccaggcatggtctggcaggacagagatgtgtaccttcaggggcccatctgggcaaagattccacacacggacggacattttcacccctctcccctcatgggtggattcggacttaaacaccctccgcctcagatcctgatcaagaacacgcctgtacccgcggatcctccgaccaccttcaaccagtcaaagctgaactctttcatcacccagtattctactggccaagtcagcgtggagatcgagtgggagctgcagaaggaaaacagcaagcgctggaaccccgagatccagtacacctccaactactacaaatctacaagtgtggactttgctgttaatacagaaggcgtgtactctgaaccccgccccattggcacccgttacctcacccgtaatctgtaa

SEQ ID NO: 371 - protein, 737 aa, Artificial Sequence
  Description of Artificial Sequence: Synthetic polypeptide
MAADGYLPDWLEDNLSEGIREWWDLKPGAPKPKANQQKQDDGRGLVLPGYKYLGPFNGLDKGEPVNAADAAALEHDKAYDQQLKAGDNPYLRYNHADAEFQERLQEDTSFGGNLGRAVFQAKKRVLEPFGLVEEGAKTAPGKKRPVEQSPQEPDSSSGIGKTGQQPARKRLNFGQTGDADSVPDPQPLGQPPAAPSGLGTNTMATGSGAPMADNNEGADGVGNSSGNWHCDSQWLGDRVITTSTRTWALPTYNNHLYKQISNSTSGGSSNDNAYFGYSTPWGYFDFNRFHCHFSPRDWQRLINNNWGFRPKRLNFKLFNIQVKEVTQNEGTKTIANNLTSTIQVFTDSEYQLPYVLGSAHQGCLPPFPADVFMIPQYGYLTLNNGSQAVGRSSFYCLEYFPSQMLRTGNNFQFTYTFEDVPFHSSYAHSQSLDRLMNPLIDQYLYYLSRTQTTGGTTNTQTLGFSQGGPNTMANQAKNWLPGPCYRQQRVSKTFADNNNSEYSWTGATKYHLNGRDSLVNPGPAMASHKDDEEKFFPQSGVLIFGKQGSEKTNVDIEKVMITDEEEIRTTNPVATEQYGSVSTNLQRGNRQAATADVNTQGVLPGMVWQDRDVYLQGPIWAKIPHTDGHFHPSPLMGGFGLKHPPPQILIKNTPVPADPPTTFNQSKLNSFITQYSTGQVSVEIEWELQKENSKRWNPEIQYTSNYYKSTSVDFAVNTEGVYSEPRPIGTRYLTRNL

SEQ ID NO: 372 - DNA, 2217 bp, Artificial Sequence
  Description of Artificial Sequence: Synthetic polynucleotide
atggctgccgatggttatcttccagattggctcgaggacactctctctgaaggaataagacagtggtgggcgctgaaacctggagccccgaagcccaaagccaaccagcaaaagcaggacgacggccggggtctggtgcttcctggctacaagtacctcggacccttcaacggactcgacaagggggagcccgtcaacgcggcggatgcagcggccctcgagcacgacaaggcctacgaccagcagctcaaagcgggtgacaatccgtacctgcggtataaccacgccgacgccgagtttcaggagcgtctgcaagaagatacgtcttttgggggcaacctcgggcgagcagtcttccaggccaagaagcgggttctcgaacctctcggtctggttgaggaaggcgctaagacggctcctggaaagaagagaccggtagagccatcaccccagcgttctccagactcctctacgggcatcggcaagaaaggccaacagcccgccagaaaaagactcaattttggtcagactggcgactcagagtcagttccagaccctcaacctctcggagaaccaccagcagcccccacaagtttgggatctaatacaatggcttcaggcggtggcgcaccaatggcagacaataacgagggtgccgatggagtgggtaattcctcaggaaattggcattgcgattcccaatggctgggcgacagagtcatcaccaccagcacccgcacctgggccttgcccacctacaataaccacctctacaagcaaatctccagtgcttcaacgggggccagcaacgacaaccactacttcggctacagcaccccctgggggtattttgactttaaccgcttccactgccacttctcgccaagagactggcaaagactcatcaacaacaattggggattccggcccaagagactcaacttcaaactcttcaacatccaagtcaaggaggtcacgacgaatgatggcgtcacgaccatcgccaataacctcaccagcaccatccaggtgtttacggactcggagtaccagctgccgtacgttctcggctctgcccaccagggctgcctgcctccgttcccggcggacgtgttcatgattccccagtatggatacctcaccctgaacaacggaagtcaagcggtgggacgctcatccttttactgcctggagtacttcccttcgcagatgctaaggactggaaataacttccaattcagctataccttcgaggatgtaccttttcacagcagctacgctcacagccagagtttggatcgcttgatgaatcctcttattgatcagtatctgtactacctgaacagaacgcaaggaacaacctctggaacaaccaaccaatcacggctgctttttagccaggctgggcctcagtctatgtctttgcaggccagaaattggctacctgggccctgctaccggcaacagagactttcaaagactgctaacgacaacaacaacagtaactttccttggacagcagccagcaaatatcatctcaatggccgcgactcgctggtgaatccaggaccagctatggccagtcacaaggacgatgaagaaaaatttttccctatgcacggcaatctaatatttggcaaagaagggacaacggcaagtaacgcagaattagataatgtaatgattacggatgaagaagagattcgtaccaccaatcctgtggcaacagagcagtatggaactgtggcaaataacttgcagagctcaaatacagctcccacgactagaactgtcaatgatcagggggccttacctggcatggtgtggcaagatcgtgacgtgtaccttcaggggcccatctgggcaaagattccacacacggacggacattttcacccctctcccctcatgggtggattcggacttaaacaccctcctccgcagattctcatcaagaacaccccggtacctgcgaatccttcgaccaccttcagtgcggcaaagtttgcttccttcatcacacagtactccacgggacaggtcagcgtggagatcgagtgggagctgcagaaggaaaacagcaagcgctggaacccggagatccagtacacttccaactattacaagtctaataatgttgaatttgctgttaatactgaaggtgtatatagtgaaccccgccccattggcaccagatacctgactcgtaatctgtaa

SEQ ID NO: 373 - protein, 738 aa, Artificial Sequence
  Description of Artificial Sequence: Synthetic polypeptide
MAADGYLPDWLEDTLSEGIRQWWALKPGAPKPKANQQKQDDGRGLVLPGYKYLGPFNGLDKGEPVNAADAAALEHDKAYDQQLKAGDNPYLRYNHADAEFQERLQEDTSFGGNLGRAVFQAKKRVLEPLGLVEEGAKTAPGKKRPVEPSPQRSPDSSTGIGKKGQQPARKRLNFGQTGDSESVPDPQPLGEPPAAPTSLGSNTMASGGGAPMADNNEGADGVGNSSGNWHCDSQWLGDRVITTSTRTWALPTYNNHLYKQISSASTGASNDNHYFGYSTPWGYFDFNRFHCHFSPRDWQRLINNNWGFRPKRLNFKLFNIQVKEVTTNDGVTTIANNLTSTIQVFTDSEYQLPYVLGSAHQGCLPPFPADVFMIPQYGYLTLNNGSQAVGRSSFYCLEYFPSQMLRTGNNFQFSYTFEDVPFHSSYAHSQSLDRLMNPLIDQYLYYLNRTQGTTSGTTNQSRLLFSQAGPQSMSLQARNWLPGPCYRQQRLSKTANDNNNSNFPWTAASKYHLNGRDSLVNPGPAMASHKDDEEKFFPMHGNLIFGKEGTTASNAELDNVMITDEEEIRTTNPVATEQYGTVANNLQSSNTAPTTRTVNDQGALPGMVWQDRDVYLQGPIWAKIPHTDGHFHPSPLMGGFGLKHPPPQILIKNTPVPANPSTTFSAAKFASFITQYSTGQVSVEIEWELQKENSKRWNPEIQYTSNYYKSNNVEFAVNTEGVYSEPRPIGTRYLTRNL

SEQ ID NO: 374 - DNA, 2208 bp, Artificial Sequence; identical to SEQ ID NO: 10
  Description of Artificial Sequence: Synthetic polynucleotide

SEQ ID NO: 375 - protein, 735 aa, Artificial Sequence [sequence omitted]

SEQ ID NO: 376 - DNA, 2208 bp, Artificial Sequence
  Description of Artificial Sequence: Synthetic polynucleotide
atggctgccgatggttatcttccagattggctcgaggacaacctctctgagggcattcgcgagtggtgggcgctgaaacctggagccccgaagcccaaagccaaccagcaaaagcaggacgacggccggggtctggtgcttcctggctacaagtacctcggacccttcaacggactcgacaagggggagcccgtcaacgcggcggacgccgcggccctcgagcacgacaaggcctacgaccagcagctgcaggcgggtgacaatccgtacctgcggtataaccacgccgacgccgagtttcaggagcgtctgcaagaagatacgtcttttgggggcaacctcgggcgagcagtcttccaggccaaaaagaggcttcttgaacctcttggtctggttgaggaagcagctaaaacggctcctggaaagaagaggcctgtagagcagtctcctcaggaaccggactcctccgcgggtattggcaaatcgggtgcacagcccgccaaaaagagactcaatttcggtcagactggcgactcagagtcagtcccagaccctcaacctctcggagaaccaccagcagcccccacaagtttgggatctaatacaatggcttcaggcggtggcgcaccaatggcagacaataacgaaggcgccgacggagtgggtaatgcctcaggaaattggcattgcgattccacatggctgggcgacagagtcatcaccaccagcacccgcacctgggccttgcccacctacagcaaccatctctacaagcaaatctccagccaatcaggagcttcaaacgacaacgactactttggctacagcaccccttgggggtattttgatttcaacagattccactgccacttttcaccacgtgactggcaaagactcatcaacaacaactggggattccgacccaagagactcaacttcaagctctttaacattcaagtcaaagaggtcacgcagaatgacggtacgacgacgattgccaataaccttaccagcacggttcaggtgtttactgactcggagtaccagctcccgtacgtcctcggctcggcgcatcaaggatgcctcccgccgttcccagcagacgtcttcatggtgccacagtatggatacctcaccctgaacaacgggagtcaggcagtaggacgctcttcattttactgcctggagtactttccttctcagatgctgcgtaccggaaacaactttaccttcagctacacttttgaggacgttcctttccacagcagctacgctcacagccagagtctggaccgtctcatgaatcctctcatcgaccagtacctgtattacttgagcagaacaaacactccaagtggaaccaccacgcagtcaaggcttcagttttctcaggccggagcgagtgacattcgggaccagtctaggaactggcttcctggaccctgttaccgccagcagcgagtatcaaagacatctgaggataacaacaacagtgaatactcgtggactggagctaccaagtaccacctcaatggcagagactctctggtgaatccgggcccggccatggcaagccacaaggacgatgaagaaaagttttttcctcagagcggggttctcatctttgggaagcaaggctcagagaaaacaaatgtggacattgaaaaggtcatgattacagacgaagaggaaatcaggacaaccaatcccgtggctacggagcagtatggttctgtatctaccaacctccagagaggcaacagacaagcagctaccgcagatgtcaacacacaaggcgttcttccaggcatggtctggcaggacagagatgtgtaccttcaggggcccatctgggcaaagattccacacacggacggacattttcacccctctcccctcatgggtggattcggacttaaacaccctcctccacagattctcatcaagaacaccccggtacctgcgaatccttcgaccaccttcagtgcggcaaagtttgcttccttcatcacacagtactccacgggacaggtcagcgtggagatcgagtgggagctgcagaaggaaaacagcaaacgctggaatcccgaaattcagtacacttccaactacaacaagtctgttaatgtggactttactgtggacactaatggcgtgtattcagagcctcgccccattggcaccagatacctgactcgtaatctgtaa

SEQ ID NO: 377 - protein, 735 aa, Artificial Sequence
  Description of Artificial Sequence: Synthetic polypeptide
MAADGYLPDWLEDNLSEGIREWWALKPGAPKPKANQQKQDDGRGLVLPGYKYLGPFNGLDKGEPVNAADAAALEHDKAYDQQLQAGDNPYLRYNHADAEFQERLQEDTSFGGNLGRAVFQAKKRLLEPLGLVEEAAKTAPGKKRPVEQSPQEPDSSAGIGKSGAQPAKKRLNFGQTGDSESVPDPQPLGEPPAAPTSLGSNTMASGGGAPMADNNEGADGVGNASGNWHCDSTWLGDRVITTSTRTWALPTYSNHLYKQISSQSGASNDNDYFGYSTPWGYFDFNRFHCHFSPRDWQRLINNNWGFRPKRLNFKLFNIQVKEVTQNDGTTTIANNLTSTVQVFTDSEYQLPYVLGSAHQGCLPPFPADVFMVPQYGYLTLNNGSQAVGRSSFYCLEYFPSQMLRTGNNFTFSYTFEDVPFHSSYAHSQSLDRLMNPLIDQYLYYLSRTNTPSGTTTQSRLQFSQAGASDIRDQSRNWLPGPCYRQQRVSKTSEDNNNSEYSWTGATKYHLNGRDSLVNPGPAMASHKDDEEKFFPQSGVLIFGKQGSEKTNVDIEKVMITDEEEIRTTNPVATEQYGSVSTNLQRGNRQAATADVNTQGVLPGMVWQDRDVYLQGPIWAKIPHTDGHFHPSPLMGGFGLKHPPPQILIKNTPVPANPSTTFSAAKFASFITQYSTGQVSVEIEWELQKENSKRWNPEIQYTSNYNKSVNVDFTVDTNGVYSEPRPIGTRYLTRNL

SEQ ID NO: 378 - DNA, 2208 bp, Artificial Sequence
  Description of Artificial Sequence: Synthetic polynucleotide
atggctgccgatggttatcttccagattggctcgaggacaacctctctgagggcattcgcgagtggtgggcgctgaaacctggagccccgaagcccaaagccaaccagcaaaagcaggacgacggccggggtctggtgcttcctggctacaagtacctcggacccttcaacggactcgacaagggggagcccgtcaacgcggcggacgcagcggccctcgagcacgacaaggcctacgaccagcagctgcaggcgggtgacaatccgtacctgcggtataaccacgccgacgccgagttccaggagcgtctgcaagaagatacgtcttttgggggcaacctcgggcgagcagtcttccaggccaagaagagggttctcgaaccttttggtctggttgaggaaggtgctaagacggctcctggaaagaaacgtccggtagagcagtcgccacaagagccagactcctcctcgggcattggcaagacaggccagcagcccgctaaaaagagactcaattttggtcagactggcgactcagagtcagtcccagaccctcaacctctcggagaaccaccagcagcccccacaagtttgggatctaatacaatggcttcaggcggtggcgcaccaatggcagacaataacgagggcgccgacggagtgggtaattcctcgggaaattggcattgcgattccacatggatgggcgacagagtcatcaccaccagcacccgaacctgggccctgcccacctacaacaaccacctctacaaacaaatttccagccaatcaggagcttcaaacgacaaccactactttggctacagcaccccttgggggtattttgactttaacagattccactgccacttttcaccacgtgactggcagcgactcattaacaacaactggggattccggcccaagaaactcaacttcaagctctttaacatccaggtcaaggaggtcacgcagaatgaaggcaccaagaccatcgccaataacctcaccagcaccatccaggtgtttacggactcggagtaccagctgccgtacgttctcggctctgcccaccagggctgcctgcctccgttcccggcggacgtgttcatgattccccagtacggctacctaacactcaacaacggtagtcaggccgtgggacgctcctccttctactgcctggaatactttccttcgcagatgctgagaaccggcaacaacttccagtttacttacaccttcgaggacgtgcctttccacagcagctacgcccacagccagagcttggaccggctgatgaatcctctgattgaccagtacctgtattacttgtctcggactcaaacaacaggaggcacgacaaatacgcagactctgggcttcagccaaggtgggcctaatacaatggccaatcaggcaaagaactggctgcctggaccctgttaccgccagcagcgagtatcaaagacatctgcggataacaacaacagtgaatactcgtggactggagctaccaagtaccacctcaatggcagagactctctggtgaatccgggcccggccatggcaagccacaaggacgatgaagaaaagttttttcctcagagcggggttctcatctttgggaagcaaggctcagagaaaacaaatgtggacattgaaaaggttatgattacagacgaagaggaaatcaggacaaccaatcccgtggctacggagcagtatggttctgtatctaccaacctccagagaggcaacagacaagcagctaccgcagatgtcaacacacagggcgttcttccaggcatggtctggcaggacagagatgtgtaccttcagggtcccatttgggccaaaattcctcacacagatggacactttcacccgtcccctcttatgggcggctttggactcaagaacccgcctcctcagatcctcatcaaaaacacgcctgttcctgcgaatcctccggcagagttttcagctacaaagtttgcttcattcatcacccaatactccacaggacaagtgagtgtggaaattgaatgggagctgcagaaagaaaacagcaagcgctggaatcccgaagtgcagtacacatccaattatgcaaaatctgccaacgttgattttactgtggacactaatggcgtgtattcagagcctcgccccattggcaccagatacctcacccgtaatctgtaa

SEQ ID NO: 379 - protein, 735 aa, Artificial Sequence
  Description of Artificial Sequence: Synthetic polypeptide
MAADGYLPDWLEDNLSEGIREWWALKPGAPKPKANQQKQDDGRGLVLPGYKYLGPFNGLDKGEPVNAADAAALEHDKAYDQQLQAGDNPYLRYNHADAEFQERLQEDTSFGGNLGRAVFQAKKRVLEPFGLVEEGAKTAPGKKRPVEQSPQEPDSSSGIGKTGQQPAKKRLNFGQTGDSESVPDPQPLGEPPAAPTSLGSNTMASGGGAPMADNNEGADGVGNSSGNWHCDSTWMGDRVITTSTRTWALPTYNNHLYKQISSQSGASNDNHYFGYSTPWGYFDFNRFHCHFSPRDWQRLINNNWGFRPKKLNFKLFNIQVKEVTQNEGTKTIANNLTSTIQVFTDSEYQLPYVLGSAHQGCLPPFPADVFMIPQYGYLTLNNGSQAVGRSSFYCLEYFPSQMLRTGNNFQFTYTFEDVPFHSSYAHSQSLDRLMNPLIDQYLYYLSRTQTTGGTTNTQTLGFSQGGPNTMANQAKNWLPGPCYRQQRVSKTSADNNNSEYSWTGATKYHLNGRDSLVNPGPAMASHKDDEEKFFPQSGVLIFGKQGSEKTNVDIEKVMITDEEEIRTTNPVATEQYGSVSTNLQRGNRQAATADVNTQGVLPGMVWQDRDVYLQGPIWAKIPHTDGHFHPSPLMGGFGLKNPPPQILIKNTPVPANPPAEFSATKFASFITQYSTGQVSVEIEWELQKENSKRWNPEVQYTSNYAKSANVDFTVDTNGVYSEPRPIGTRYLTRNL

SEQ ID NO: 380 - DNA, 2214 bp, Artificial Sequence; identical to SEQ ID NO: 370
  Description of Artificial Sequence: Synthetic polynucleotide

SEQ ID NO: 381 - protein, 737 aa, Artificial Sequence; identical to SEQ ID NO: 371
  Description of Artificial Sequence: Synthetic polypeptide

SEQ ID NO: 382 - DNA, 2196 bp, Adeno-associated virus
atggctgctgacggttatcttccagattggctcgaggacaacctctctgagggcattcgcgagtggtgggcgctgaaacctggagccccgcaacccaaagccaaccagcaaaagcaggacgacggccggggtctggtgcttcctggctacaagtacctcggacccttcaacggactcgacaagggggagcccgtcaacgaggcggacgccgcggccctcgagcacgacaaggcctacgaccagcagctcaaagcgggtgacaatccgtacctgcggtataatcacgccgacgccgagtttcaagagcgtctgcaagaagatacgtcctttgggggcaacctcgggcgagcagtcttccaggccaaaaagagggtactcgagcctctgggtctggttgaggaaggcgctaagacggctcctggaaagaagcggccagtagaaccggactccagctcgggcatcggcaagtcaggccagcagcccgcgaaaaagagactgaattttgggcagactggcgactcagagtcagtgcctgacccccaacctctctcagaaccacccgcaggtccctctggtctgggatctggtacaatggctgctggcggtggcgctccaatggcagacaataacgaaggcgccgacggagtgggtaatgtctcaggaaattggcattgcgattccacatggctgggcgaccgagtcatcaccaccagcactcggacctgggccctccccacctacaacaaccacctctacaagcaaatctccaacgggacctcgggaggcagcagcaacgacaacacctactttggctacagcaccccctgggggtattttgactttaacagattccactgccacttttcaccacgtgactggcagcgactcatcaacaacaactgggggttccggcccaagaagctcaacttcaagctcttcaacatccaggtcaaggaggtcacccagaatgaaggcaccaagaccatcgccaataacctcaccagcacggtgcaggtctttacggactcggagtaccagctcccgtacgtgctcggctctgcccaccagggctgcctgcctccgttcccggcggacgtgttcatgattccgcagtacgggtacctgacgctgaacaacgggagccaggccgtggggcgatcctccttctactgcctggagtactttccctcgcagatgctgagaacgggcaacaactttaccttcagctacaccttcgaggacgtgcccttccacagcagctacgcgcacagccagagcctggaccggctgatgaacccgctgattgaccagtacctgtactacctgtctcggactcagaccaacgggaccaatgccacgcagactctgttgtttgctcaggccgggcctcagaacatgtcggctcaggccaagaactggctgcctggtccttgctatcggcagcagcgcgtctctacgacagtgtcgcaaaacaacaacagcaactttacctggaccggggcgaccaagtaccacctgaacggccgagactccctggtgagccccggtgtcgccatggcaacgcacaaggacgacgaggagcgcttcttcccgagcagcggggtcctgatgtttggcaagcagggcgctggaaaggacaatgtcgagtacaccaacgtgatgctcaccagcgaggaggagatcaagaccaccaaccctgtggccacggagcagtacggcgtggtggctgacaatctgcagcagaccaactcagctcccattgtgggggcagtcaacagccagggggccttacccggtatggtctggcagaaccgggacgtgtacctgcagggtcccatctgggccaagatcccgcatacggacggcaactttcacccgtctcctctcatgggcggctttggactgaaacacccgcctccccagatcctgatcaaaaacacgccggtacctgcggatcccccggtgaactttacggacgctaagctggcgagtttcatcacgcagtacagcaccgggcaggtcagcgtggagattgagtgggagctgcagaaggagaacagcaagcgctggaatcccgagattcagtacacttccaattattataaatcagctaatgtggactttgccgtcaatgcagatggtgtatatagtgaaccccgccccattggcactcgttacctcacccgtaatctgtaa

SEQ ID NO: 383 - protein, 731 aa, Adeno-associated virus
MAADGYLPDWLEDNLSEGIREWWALKPGAPQPKANQQKQDDGRGLVLPGYKYLGPFNGLDKGEPVNEADAAALEHDKAYDQQLKAGDNPYLRYNHADAEFQERLQEDTSFGGNLGRAVFQAKKRVLEPLGLVEEGAKTAPGKKRPVEPDSSSGIGKSGQQPAKKRLNFGQTGDSESVPDPQPLSEPPAGPSGLGSGTMAAGGGAPMADNNEGADGVGNVSGNWHCDSTWLGDRVITTSTRTWALPTYNNHLYKQISNGTSGGSSNDNTYFGYSTPWGYFDFNRFHCHFSPRDWQRLINNNWGFRPKKLNFKLFNIQVKEVTQNEGTKTIANNLTSTVQVFTDSEYQLPYVLGSAHQGCLPPFPADVFMIPQYGYLTLNNGSQAVGRSSFYCLEYFPSQMLRTGNNFTFSYTFEDVPFHSSYAHSQSLDRLMNPLIDQYLYYLSRTQTNGTNATQTLLFAQAGPQNMSAQAKNWLPGPCYRQQRVSTTVSQNNNSNFTWTGATKYHLNGRDSLVSPGVAMATHKDDEERFFPSSGVLMFGKQGAGKDNVEYTNVMLTSEEEIKTTNPVATEQYGVVADNLQQTNSAPIVGAVNSQGALPGMVWQNRDVYLQGPIWAKIPHTDGNFHPSPLMGGFGLKHPPPQILIKNTPVPADPPVNFTDAKLASFITQYSTGQVSVEIEWELQKENSKRWNPEIQYTSNYYKSANVDFAVNADGVYSEPRPIGTRYLTRNL

SEQ ID NO: 384 - DNA, 2196 bp, Adeno-associated virus
atggctgctgacggttatcttccagattggctcgaggacaacctctctgagggcattcgcgagtggtgggcgctgaaacctggagccccgcaacccaaagccaaccagcaaaagcaggacgacggccggggtctggtgcttcctggctacaagtacctcggacccttcaacggactcgacaagggggagcccgtcaacgaggcggacgccgcggccctcgagcacgacaaggcctacgaccagcagctcaaagcgggtgacaatccgtacctgcggtataatcacgccgacgccgagtttcaagagcgtctgcaagaagatacgtcctttgggggcaacctcgggcgagcagtcttccaggccaaaaagagggtactcgagcctctgggtctggttgaggaaggcgctaagacggctcctggaaagaagcggccagtagaaccggactccagctcgggcatcggcaagtcaggccggcagcccgcgaaaaagagactgaattttgggcagactggcgactcagagtcagtgcctgacccccaacctctctcagaaccacccgcaggtccctctggtctgggatctggtacaatggctgcaggcggtggcgctccaatggcagacaataacgaaggcgccgacggagtgggtaatgcctcaggaaattggcattgcgattccacatggctgggcgaccgagtcatcaccaccagcactcggacctgggccctccccacctacaacaaccacctctacaagcaaatctccaacgggacctcgggaggcagcagcaacgacaacacctactttggctacagcaccccctgggggtattttgactttaacagattccactgccacttttcaccacgtgactggcagcgactcatcaacaacaactggggattccggcccaagaggctcaacttcaagctcttcaacatccaggtcaaggaggtcacccagaatgaaggcaccaagaccatcgccaataacctcaccagcacggtgcaggtctttacggactcgaagtaccagctcccgtacgtgctcggctctgcccaccagggctgcctgcctccgttcccggcggacgtgttcatgattccgcagtacgggtacctgacgctgaacaacgggagccaggccgtggggcgatcctccttctactgcctggagtactttccctcgcagatgctgagaacgggcaacaactttaccttcagctacaccttcgaggacgtgcccttccacagcagctacgcgcacagccagagcctggaccggctgatgaacccgctgattgaccagtacctgtactacctgtctcggactcagaccaacgggaccaatgccacgcagactctgttgtttgctcaggccgggcctcagaacatgtcggctcaggccaagaactggctgcctggtccttgctatcggcagcagcgcgtctctacgacagtgtcgcaaaacaacaacagcaactttacctggaccggggcgaccaagtaccacctgaacggccgagactccctggtgaaccccggtgtcgccatggcaacgcacaaggacgacgaggagcgcttcttcccgagcagcggggtcctgatgtttggcaagcagggcgctggaaaggacaatgtcgagtacaccaacgtgatgctcaccagcgaggaggagatcaagaccaccaaccctgtggccacggagcagtacggtgtggtggctgacaatctgcagcagaccaactcggctcccattgtgggggcagtcaacagccagggggccttacccggtatggtctggcagaaccgggacgtgtacctgcagggtcccatctgggccaagatcccgcatacggacggcaactttcacccgtctcctctcatgggcggctttggactgaaacacccgcctccccagatcctgatcaaaaacacgccggtacctgcggatcccccggtgaactttacggacgctaagctggcgagtttcatcacgcagtacagcaccgggcaggtcagcgtggagattgagtgggagctgcagaaggagaacagcaagcgctggaatcccgagattcagtacacttccaattattataaatcagctaatgtggactttgccgtcaatgcagatggtgtatatagtgaaccccgccccattggcactcgttacctcacccgtaatctgtaa

SEQ ID NO: 385 - protein, 731 aa, Adeno-associated virus
MAADGYLPDWLEDNLSEGIREWWALKPGAPQPKANQQKQDDGRGLVLPGYKYLGPFNGLDKGEPVNEADAAALEHDKAYDQQLKAGDNPYLRYNHADAEFQERLQEDTSFGGNLGRAVFQAKKRVLEPLGLVEEGAKTAPGKKRPVEPDSSSGIGKSGRQPAKKRLNFGQTGDSESVPDPQPLSEPPAGPSGLGSGTMAAGGGAPMADNNEGADGVGNASGNWHCDSTWLGDRVITTSTRTWALPTYNNHLYKQISNGTSGGSSNDNTYFGYSTPWGYFDFNRFHCHFSPRDWQRLINNNWGFRPKRLNFKLFNIQVKEVTQNEGTKTIANNLTSTVQVFTDSKYQLPYVLGSAHQGCLPPFPADVFMIPQYGYLTLNNGSQAVGRSSFYCLEYFPSQMLRTGNNFTFSYTFEDVPFHSSYAHSQSLDRLMNPLIDQYLYYLSRTQTNGTNATQTLLFAQAGPQNMSAQAKNWLPGPCYRQQRVSTTVSQNNNSNFTWTGATKYHLNGRDSLVNPGVAMATHKDDEERFFPSSGVLMFGKQGAGKDNVEYTNVMLTSEEEIKTTNPVATEQYGVVADNLQQTNSAPIVGAVNSQGALPGMVWQNRDVYLQGPIWAKIPHTDGNFHPSPLMGGFGLKHPPPQILIKNTPVPADPPVNFTDAKLASFITQYSTGQVSVEIEWELQKENSKRWNPEIQYTSNYYKSANVDFAVNADGVYSEPRPIGTRYLTRNL

SEQ ID NO: 386 - DNA, 2196 bp, Adeno-associated virus
atggctgctgacggttatcttccagattggctcgaggacaacctctctgagggcattcgcgagtggtgggcgctgaaacctggagccccgcaacccaaagccaaccagcaaaagcaggacgacggccggggtctggtgcttcctggctacaagtacctcggacccttcaacggactcgacaagggggagcccgtcaacgaggcggacgccgcggccctcgagcacgacaaggcctacgaccagcagctcaaagcgggtgacaatccgtacctgcggtataatcacgccgacgccgagtttcaagagcgtctgcaagaagatacgtcctttgggggcaacctcgggcgagcagtcttccaggccaaaaagagggtactcgagcctctgggtctggttgaggaaggcgctaagacggctcctggaaagaagcggccagtagaaccggactccagctcgggcatcggcaagtcaggccagcagcccgcgaaaaagagactgaattttgggccgactggcgactcagagtcagtgcctgacccccaacctctctcagaaccacctgcaggtccctctggtctgggatctggtacaatggctgcaggcggtggcgctccaatggcagacaataacgaaggcgccgacggagtgggtaatgtctcaggaaattggcattgcgattccacatggctgggcgaccgagtcatcaccaccagcactcggacctgggccctccccacctacaacaaccacctctacaagcaaatctccaacgggacctcgggaggcagcagcaacgacaacacctactttggctacagcaccccctgggggtattttgactttaacagattccactgccacttttcaccacgcgactggcagcgactcatcaacaacaactggggattccggcccaagaagctcaacttcaagctcttcaacatccaggtcaaggaggtcacccagaatgaaggcaccaagaccaccgccaataacctcaccagcacggtgcaggtctttacggactcggagtaccagctcccgtacgtgctcggctctgcccaccagggctgcctgcctccgttcccggcggacgtgttcatgattccgcagtacgggtacctgacgctgaacaacgggagccaggccgtggggcgatcctccttctactgcctggagtactttccctcgcagatgctgagaacgggcaacaactttaccttcagctacaccttcgaggacgtgcccttccacagcagctacgcgcacagccagagcctggaccggctgatgaacccgctgattgaccagtacctgtactacctgtctcggactcagaccaacgggaccaatgccacgcagactctgttgtttgctcaggccgggcctcagaacatgtcggctcaggccaagaactggctgcctggtccttgctatcggcagcagcgcgtctctacggcagtgtcgcaaaacaacaacagcaactttacctggaccggggcgaccaagtaccacctgaacggccgagactccctggtgaaccccggtgtcgccatggcaacgcacaaggacgacgaggagcgcttcttcccgagcagcggggtcctgatgtttggcaagcagggcgctggaaaggacaatgtcgagtacaccaacgtgatgctcaccagcgaggaggagatcaagaccaccaaccctgtggccacggagcagtacggtgtggtggctgacaatctgcagcagaccaactcggctcccattgtgggggcagtcaacagccagggggccttacccggtatggtctggcagaaccgggacgtgtacctgcagggtcccatctgggccaagatcccgcatacggacggcaactttcacccgtctcctctcatgggcggctttggactgaaacacccgcctccccagatcctgatcaaaaacacgccggtacctgcggatcccccggtgaactttacggacgctaagctggcgagtttcatcacgcagtacagcaccgggcaggtcagcgtggagattgagtgggagctgcagaaggagaacagcaagcgctggaatcccgagattcagtacacttccaattattataaatcagctaatgtggactttgccgtcaatgcagatggtgtatatagcgaaccccgccccattggcactcgttacctcacccgtaatctgtaa

SEQ ID NO: 387 - protein, 731 aa, Adeno-associated virus
MAADGYLPDWLEDNLSEGIREWWALKPGAPQPKANQQKQDDGRGLVLPGYKYLGPFNGLDKGEPVNEADAAALEHDKAYDQQLKAGDNPYLRYNHADAEFQERLQEDTSFGGNLGRAVFQAKKRVLEPLGLVEEGAKTAPGKKRPVEPDSSSGIGKSGQQPAKKRLNFGPTGDSESVPDPQPLSEPPAGPSGLGSGTMAAGGGAPMADNNEGADGVGNVSGNWHCDSTWLGDRVITTSTRTWALPTYNNHLYKQISNGTSGGSSNDNTYFGYSTPWGYFDFNRFHCHFSPRDWQRLINNNWGFRPKKLNFKLFNIQVKEVTQNEGTKTTANNLTSTVQVFTDSEYQLPYVLGSAHQGCLPPFPADVFMIPQYGYLTLNNGSQAVGRSSFYCLEYFPSQMLRTGNNFTFSYTFEDVPFHSSYAHSQSLDRLMNPLIDQYLYYLSRTQTNGTNATQTLLFAQAGPQNMSAQAKNWLPGPCYRQQRVSTAVSQNNNSNFTWTGATKYHLNGRDSLVNPGVAMATHKDDEERFFPSSGVLMFGKQGAGKDNVEYTNVMLTSEEEIKTTNPVATEQYGVVADNLQQTNSAPIVGAVNSQGALPGMVWQNRDVYLQGPIWAKIPHTDGNFHPSPLMGGFGLKHPPPQILIKNTPVPADPPVNFTDAKLASFITQYSTGQVSVEIEWELQKENSKRWNPEIQYTSNYYKSANVDFAVNADGVYSEPRPIGTRYLTRNL

SEQ ID NO: 388 - DNA, 4404 bp, Adeno-associated virus
atggctgccgatggttatcttccagattggctcgagggcaacctctctgagggcattcgcgagtggtgggacttgaaacctggagccccgaaacccaaagccaaccagcaaaagcaggacgacggccggggtctggtgcttcctggctacaggtacctcggacccttcaacggactcgacaagggagagccggtcaacgaggcagacgccgcggccctcgagcacgacaaggcctacgacaagcagctcgagcagggggacaacccgtacctcaagtacaaccacgccgacgccgagtttcaggagcgtcttcaagaagatacgtcttttgggggcaacctcgggcgagcagtcttccaggccaagaagcgggttctcgaacctctcggtctggttgaggaaggcgctaagacggctcctggaaagaagagacccatagaatcccccgactcctccacgggcatcggcaagaacggccagccgcccgctaaaaagaagctcaactttgggcagactggcgactcagagtcagtgcccgacccccaacctctcggagaacctcccgccgcgccctcaggtctgggatctggtacaatggctgcaggcggtggcgcaccaatggcagacaataacgaaggcgccgacggagtgggtaatgcctccggaaattggcattgcgattccacatggctgggcgacagagtcatcaccaccagcacccgcacctgggccctgcccacctacaacaaccacctctacaagcagatatcaagtcagagcggggctaccaacgacaaccacttcttcggctacagcaccccctggggctattttgacttcaacagattccactgccacttctcaccacgtgactggcagcgactcatcaacaacaactggggattccggcccagaaagctgcggttcaagttgttcaacatccaggtcaaggaggtcacgacgaacgacggcgttacgaccatcgctaataaccttaccagcacgattcaggtcttctcggactcggagtaccaactgccgtacgtcctcggctctgcgcaccagggctgcctccctccgttccctgcggacgtgttcatgattcctcagtacggatatctgactctaaacaacggcagtcagtctgtgggacgttcctccttctactgcctggagtactttccttctcagatgctgagaacgggcgataactttgaattcagctacacctttgaggaagtgcctttccacagcagctatgcgcacagccagagcctggaccggctgatgaatcccctcatcgaccagtacctgtactacctggcccggacccagagcactacggggtccacaagggagctgcagttccatcaggctgggcccaacaccatggccgagcaatcaaagaactggctgcccggaccctgttatcggcagcagagactgtcaaaaaacatagacagcaacaacaacagtaactttgcctggaccggggccactaaataccatctgaatggtagaaattcattaaccaacccgggcgtagccatggccaccaacaaggacgacgaggaccagttctttcccatcaacggagtgctggtttttggcaaaacgggggctgccaacaagacaacgctggaaaacgtgctaatgaccagcgaggaggagatcaaaaccaccaatcccgtggctacagaagaatacggtgtggtctccagcaacctgcaatcgtctacggccggaccccagacacagactgtcaacagccagggggctctgcccggcatggtctggcagaaccgggacgtgtacctgcagggtcccatctgggccaaaattcctcacacggacggcaactttcacccgtctcccctgatgggcggatttggactcaaacacccgcctcctcaaattctcatcaaaaacaccccggtacctgctaatcctccagaggtgtttactcctgccaagtttgcctcatttatcacgcagtacagcaccggccaggtcagcgtggagatcgagtgggaactgcagaaagaaaacagcaaacgctggaatccagagattcagtacacctcaaattatgccaagtctaataatgtggaatttgctgtcaacaacgaaggggtttatactgagcctcgccccattggcacccgttacctcacccgtaacctgtaaatggctgccgatggttatcttccagattggctcgaggacaacctctctgagggcattcgcgagtggtgggacttgaaacctggagccccgaaacccaaagccaaccagcaaaagcaggacgacggccggggtctggtgcttcctggctacaagtacctcggacccttcaacggactcgacaagggggagcccgtcaacgcggcggacgcagcggccctcgagcacgacaaggcctacgaccagcagctcaaagcgggtgacaatccgtacctgcggtataaccacgccgacgccgagtttcaggagcgtctgcaagaagatacgtcttttgggggcaacctcgggcgagcagtcttccaggccaagaagcgggttctcgaacctctcggtctggttgaggaaggcgctaagacggctcctggaaagaagagaccggtagagccatcaccccagcgttctccagactcctctacgggcatcggcaagaaaggccagcagcccgcgaaaaagagactcaactttgggcagactggcgactcagagtcagtgcccgaccctcaaccaatcggagaaccccccgcaggcccctctggtctgggatctggtacaatggctgcaggcggtggcgctccaatggcagacaataacgaaggcgccgacggagtgggtagttcctcaggaaattggcattgcgattccacatggctgggcgacagagtcatcaccaccagcacccgaacctgggccctccccacctacaacaaccacctctacaagcaaatctccaacgggacttcgggaggaagcaccaacgacaacacctacttcggctacagcaccccctgggggtattttgactttaacagattccactgccacttctcaccacgtgactggcagcgactcatcaacaacaactggggattccggcccaagagactcaacttcaagctcttcaacatccaggtcaaggaggtcacgcagaatgaaggcaccaagaccatcgccaataaccttaccagcacgattcaggtctttacggactcggaataccagctcccgtacgtcctcggctctgcgcaccagggctgcctgcctccgttcccggcggacgtcttcatgattcctcagtacgggtacctgactctgaacaatggcagtcaggccgtgggccgttcctccttctactgcctggagtactttccttctcaaatgctgagaacgggcaacaactttgagttcagctaccagtttgaggacgtgccttttcacagcagctacgcgcacagccaaagcctggaccggctgatgaaccccctcatcgaccagtacctgtactacctgtctcggactcagtccacgggaggtaccgcaggaactcagcagttgctattttctcaggccgggcctaataacatgtcggctcaggccaaaaactggctacccgggccctgctaccggcagcaacgcgtctccacgacactgtcgcaaaataacaacagcaactttgcctggaccggtgccaccaagtatcatctgaatggcagagactctctggtaaatcccggtgtcgctatggcaacccacaaggacgacgaagagcgattttttccgtccagcggagtcttaatgtttgggaaacagggagctggaaaagacaacgtggactatagcagcgttatgctaaccagtgaggaagaaattaaaaccaccaacccagtggccacagaacagtacggcgtggtggccgataacctgcaacagcaaaacgccgctcctattgtaggggccgtcaacagtcaaggagccttacctggcatggtctggcagaaccgggacgtgtacctgcagggtcctatctgggccaagattcctcacacggacggaaactttcatccctcgccgctgatgggaggctttggactgaaacacccgcctcctcagatcctgattaagaatacacctgttcccgcggatcctccaactaccttcagtcaagctaagctggcgtcgttcatcacgcagtacagcaccggacaggtcagcgtggaaattgaatgggagctgcagaaagaaaacagcaaacgctggaacccagagattcaatacacttccaactactacaaatctacaaatgtggactttgctgttaacacagatggcacttattctgagcctcgccccatcggcacccgttacctcacccgtaatctgtaa

SEQ ID NO: 389 - protein, 738 aa, Adeno-associated virus; identical to SEQ ID NO: 7

SEQ ID NO: 390 - DNA, 3129 bp, Adeno-associated virus
gaattcgccctttctacggctgcgtcaactggaccaatgagaactttcccttcaacgattgcgtcgacaagatggtgatctggtgggaggagggcaagatgacggccaaggtcgtggagtccgccaaggccattctcggcggcagcaaagtgcgcgtggaccaaaagtgcaagtcgtccgcccagatcgaccccacccccgtgatcgtcacctccaacaccaacatgtgcgccgtgattgacgggaacagcaccaccttcgagcaccagcagccgttgcaggaccggatgttcaagtttgaactcacccgccgtctggagcacgactttggcaaggtgacaaagcaggaagtcagagagttcttccgctgggcgcaggatcacgtgaccgaggtggcgcacgagttctacgtcagaaagggtggagccaacaagagacccgcccccgatgacgcggataaaagcgagcccaagcgggcctgcccctcagtcgcggatccatcgacgtcagacgcggaaggagctccggtggactttgccgacaggtaccaaaacaaatgttctcgtcacgcgggcatgcttcagatgctgtttccctgcaaaacatgcgagagaatgaatcagaatttcaacatttgcttcacgcacgggaccagagactgttcagaatgtttccccggcgtgtcagaatctcaaccggtcgtcagaaaaaagacgtatcggaaactctgtgcgattcatcatctgctgggggcgggcacccgagattgcttgctcggcctgcgatctggtcaacgtggacctagatgactgtgtttctgagcaataaatgacttaaaccaggtatggctgccgatggttatcttccagattggctcgaggacaacctctctgagggcattcgcgagtggtgggacttgaaacctggagccccgaaacccaaagccaaccagcaaaagcaggacgacggccggggtctggtgcttcctggctacaagtacctcggacccttcaacggactcgacaagggggagcccgtcaacgcggcggacgcagcggccctcgagcacgacaaggcctacgaccagcagctcaaagcgggtgacaatccgtacctgcggtataaccacgccgacgccgagtttcaggagcgtctgcaagaagatacgtcttttgggggcaacctcgggcgagcagtcttccaggccaagaagcgggttctcgaacctctcggtctggttgaggaaggcgctaagacggctcctggaaagaagagaccggtagagccatcaccccagcgttctccagactcctctacgggcatcggcaagaaaggccagcagcccgcgaaaaagagactcaactttgggcagactggcgactcagagtcagtgcccgaccctcaaccaatcggagaaccccccgcaggcccctctggtctgggatctggtacaatggctgcaggcggtggcgctccaatggcagacaataacgaaggcgccgacggagtgggtagttcctcaggaaattggcattgcgattccacatggctgggcgacagagtcatcaccaccagcacccgaacctgggccctccccacctacaacaaccacctctacaagcaaatctccaacgggacttcgggaggaagcaccaacgacaacacctacttcggctacagcaccccctgggggtattttgactttaacagattccactgccacttctcaccacgtgactggcagcgactcatcaacaacaactggggattccggcccaagagactcaacttcaagctcttcaacatccaggtcaaggaggtcacgcagaatgaaggcaccaagaccatcgccaataaccttaccagcacgattcaggtctttacggactcggaataccagctcccgtacgtcctcggctctgcgcaccagggctgcctgcctccgttcccggcggacgtcttcatgattcctcagtacgggtacctgactctgaacaatggcagtcaggccgtgggccgttcctccttctactgcctggagtactttccttctcaaatgctgagaacgggcaacaactttgagttcagctaccagtttgaggacgtgccttttcacagcagctacgcgcacagccaaagcctggaccggctgatgaaccccctcatcgaccagtacctgtactacctgtctcggactcagtccacgggaggtaccgcaggaactcagcagttgctattttctcaggccgggcctaataacatgtcggctcaggccaaaaactggctacccgggccctgctaccggcagcaacgcgtctccacgacactgtcgcaaaataacaacagcaactttgcctggaccggtgccaccaagtatcatctgaatggcagagactctctggtaaatcccggtgtcgctatggcaacccacaaggacgacgaagagcgattttttccgtccagcggagtcttaatgtttgggaaacagggagctggaaaagacaacgtggactatagcagcgttatgctaaccagtgaggaagaaattaaaaccaccaacccagtggccacagaacagtacggcgtggtggccgataacctgcaacagcaaaacgccgctcctattgtaggggccgtcaacagtcaaggagccttacctggcatggtctggcagaaccgggacgtgtacctgcagggtcctatctgggccaagattcctcacacggacggaaactttcatccctcgccgctgatgggaggctttggactgaaacacccgcctcctcagatcctgattaagaatacacctgttcccgcggatcctccaactaccttcagtcaagctaagctggcgtcgttcatcacgcagtacagcaccggacaggtcagcgtggaaattgaatgggagctgcagaaagaaaacagcaaacgctggaacccagagattcaatacacttccaactactacaaatctacaaatgtggactttgctgttaacacagatggcacttattctgagcctcgccccatcggcacccgttacctcacccgtaatctgtaattgcttgttaatcaataaaccggttgattcgtttcagttgaactttggtctctgcgaagggcgaattc

SEQ ID NO: 391 - protein, 738 aa, Adeno-associated virus; identical to SEQ ID NO: 7

SEQ ID NO: 392 - protein, 733 aa, Adeno-associated virus
MAADGYLPDWLEDNLSEGIREWWDLRPGAPKPKANQQKQDDGRGLVLPGYKYLGPFNGLDKGEPVNEADAAALEHDKAYDKQLEQGDNPYLKYNHADAEFQERLQEDTSFGGNLGRAVFQAKKRVLEPLGLVEEGAKTAPGKKRPIESPDSSTGIGKKGQQPAKKRLNFGQTGDSESVPDPQPIGEPPAGPSGLGSGTMAAGGGAPMADNNEGADGVGSSSGNWHCDSTWLGDRVITTSTRTWALPTYNNHLYKQISNGTSGGSTNDNTYFGYSTPWGYFDFNRFHCHFSPRDWQRLINNNWGFRPKRLNFKLFNIQVKEVTQNEGTKTIANNLTSTIQVFTDSEYQLPYVLGSAHQGCLPPFPADVFMIPQYGYLTLNNGSQAVGRSSFYCLEYFPSQMLRTGNNFEFSYQFEDVPFHSSYAHSQSLDRLMNPLIDQYLYYLSRTQSTGGTAGTQQLLFSQAGPNNMSAQAKNWLPGPCYRQQRVSTTVSQNNNSNFAWTGATKYHLNGRDSLVNPGVAMATHKGDEERFFPSSGVLMFGKQGAGKDNVDYSSVMLTSEEEIKTTNPVATEQYGVVADNLQQQNAAPIVGAVNSQGALPGMVWQNRDVYLQGPIWAKIPHTDGNFHPSPLMGGFGLKHPPPQILIKNTPVPADPPTTFSQAKLASFITQYSTGQVSVEIEWELQKENSKRWNPEIQYTSNYYKSTNVDFAVNTEGTYSEPRPIGTRYLTRNL

SEQ ID NO: 393 - DNA, 2501 bp, Adeno-associated virus
gaattcgcccttggctgcgtcaactggaccaatgagaactttcccttcaacgattgcgtcgacaagatggtgatctggtgggaggagggcaagatgacggccaaggtcgtggagtccgccaaggccattcatcatctgctggggcgggctcccgagattgcttgctcggcctgcgatctggtcaacgtggacctggatgactgtgtttctgagcaataaatgacttaaaccaggtatggctgccgatggttatcttccagattggctcgaggacaacctctctgagggcattcgcgagtggtgggacttgagacctggagccccgaaacccaaagccaaccagcaaaagcaggacgacggccggggtctggtgcttcctggctacaagtacctcggacccttcaacggactcgacaagggagagccggtcaacgaggcagacgccgcggccctcgagcacgacaaggcctacgacaagcagctcgagcagggggacaacccgtacctcaagtacaaccacgccgacgccgagtttcaggagcgtcttcaagaagatacgtcttttgggggcaacctcgggcgagcagtcttccaggccaagaagcgggttctcgaacctctcggtctggttgaggaaggcgctaagacggctcctggaaagaagagacccatagaatcccccgactcctccacgggcatcggcaagaaaggccagcagcccgctaaaaagagactcaactttgggcagactggcgactcagagtcagtgcccgaccctcaaccaatcggagaaccccccgcaggcccctctggtctgggatctggcacaatggctgcaggcggtggcgctccaatggcagacaataacgaaggcgccgacggagtgggtagttcctcaggaaattggcattgcgattccacatggctgggcgacagagtcatcaccaccagcacccgaacctgggccctccccacctacaacaaccacctctacaagcaaatctccaacgggacatcgggaggaagcaccaacgacaacacctacttcggctacagcaccccctgggggtattttgactttaacagattccactgccacttctcaccacgtgactggcagcgactcatcaacaacaactggggattccggcccaagagactcaacttcaagctcttcaacatccaggtcaaggaggtcacgcagaatgaaggcaccaagaccatcgccaataaccttaccagcacgattcaggtctttacggactcggaataccagctcccgtacgtcctcggctctgcgcaccagggctgcctgcctccgttcccggcggacgtcttcatgattcctcagtacgggtacctgactctgaacaacggcagtcaggccgtgggccgttcctccttctactgcctggagtactttccttctcaaatgctgagaacgggcaacaactttgagttcagctaccagtttgaggacgtgccttttcacagcagctatgcgcacagccaaagcctggaccggctgatgaaccccctcatcgaccagtacctgtactacctgtctcggactcagtccacgggaggtaccgcaggaactcagcagttgctattttctcaggccgggcctaataacatgtcggctcaggccaaaaactggctacccgggccctgctaccggcagcaacgcgtctccacgacagtgtcgcaaaataacaacagcaactttgcttggaccggtgccaccaagtatcatctgaatggcagagactctctggtaaatcccggtgtcgctatggcaacgcacaagggcgacgaagagcgattttttccatccagcggagtcttgatgtttgggaaacagggagctggaaaagacaacgtagactatagcagcgttatgctaaccagtgaggaagaaatcaaaaccaccaacccagtggccacagaacagtacggcgtggtggccgataacctgcaacagcaaaacgccgctcctattgtaggggccgtcaacagtcaaggagccttacctggcatggtctggcagaaccgggacgtgtacctgcagggtcctatctgggccaagattcctcacacggacggcaactttcatccttcgccgctgatgggaggctttggactgaaacacccgcctcctcagatcctgattaagaatacacctgttcccgcggatcctccaactaccttcagtcaagccaagctggcgtcgttcatcacgcagtacagcaccggacaggtcagcgtggaaattgaatgggagctgcagaaagagaacagcaagcgctggaacccagagattcagtatacttccaactactacaaatctacaaatgtggactttgctgtcaatactgagggtacttattcagagcctcgccccattggcacccgttacctcacccgtaacctgtaattgcctgttaatcaataaaccggttgattcgtttcagttgaactttggtctcaagggcgaattc

SEQ ID NO: 394 - DNA, 2187 bp, Adeno-associated virus
atggctgccgatggttatcttccagattggctcgaggacaacctctctgagggcattcgcgagtggtgggacttgaaacctggagccccgaaacccaaagccaaccagcaaaagcaggacgacggccggggtctggtgcttcctggctacaagtacctcggacccttcaacggactcgacaagggagagccggtcaacgaggcagacgccgcggccctcgagcacgacaaggcctacgacaagcagctcgagcagggggacaacccgtacctcaagtacaaccacgccgacgccgagtttcaggagcgtcttcaagaagatacgtcttttgggggcaacctcgggcgagcagtcttccaggccaagaagcgggttctcgaacctctcggtctggttgaggaaggcgctaagacggctcctggaaagaagagacccatagaatcccccgactcctccacgggcatcggcaagaaaggccagcagcccgctaaaaagaagctcaactttgggcagactggcgactcagagtcagtgcccgacccccaacctctcggagaacctcccgccgcgccctcaggtctgggatctggtacaatggctgcaggcggtggcgcaccaatggcagacaataacgaaggcgccgacggagtgggtaatgcctccggaaattggcattgcgattccacatggctgggcgacagagtcatcaccaccagcacccgcacctgggccctgcccacctacaacaaccacctctacaagcagatatcaagtcagagcggggctaccaacgacaaccacttcttcggctacagcaccccctggggctattttgacttcaacagattccactgccacttctcaccacgtgactggcagcgactcatcaacaacaactggggattccggcccagaaagctgcggttcaagttgttcaacatccaggtcaaggaggtcacgacgaacgacggcgttacgaccatcgctaataaccttaccagcacgattcaggtcttctcggactcggagtaccaactgccgtacgtcctcggctctgcgcaccagggctgcctccctccgttccctgcggacgtgttcatgattcctcagtacggatatctgactctaaacaacggcagtcagtctgtgggacgttcctccttctactgcctggagtactttccttctcagatgctgagaacgggcaataactttgaattcagctacacctttgaggaagtgcctttccacagcagctatgcgcacagccagagcctggaccggctgatgaatcccctcatcgaccagtacctgtactacctggcccggacccagagcactacggggtccacaagggagctgcagttccatcaggctgggcccaacaccatggccgagcaatcaaagaactggctgcccggaccctgttatcggcagcagagactgtcaaaaaacatagacagcaacaacaacagtaactttgcctggaccggggccactaaataccatctgaatggtagaaattcattaaccaacccgggcgtagccatggccaccaacaaggacgacgaggaccagttctttcccatcaacggagtgctggtttttggcgaaacgggggctgccaacaagacaacgctggaaaacgtgctaatgaccagcgaggaggagatcaaaaccaccaatcccgtggctacagaagaatacggtgtggtctccagcaacctgcaatcgtctacggccggaccccagacacagactgtcaacagccagggggctctgcccggcatggtctggcagaaccgggacgtgtacctgcagggtcccatctgggccaaaattcctcacacggacggcaactttcacccgtctcccctgatgggcggatttggactcaaacacccgcctcctcaaattctcatcaaaaacaccccggtacctgctaatcctccagaggtgtttactcctgccaagtttgcctcatttatcacgcagtacagcaccggccaggtcagcgtggagatcgagtgggaactgcagaaagaaaacagcaaacgctggaatccagagattcagtacacctcaaattatgccaagtctaataatgtggaatttgctgtcaacaacgaaggggtttatactgagcctcgccccattggcacccgttacctcacccgtaacctgtaa

SEQ ID NO: 395 - protein, 728 aa, Adeno-associated virus; identical to SEQ ID NO: 63

SEQ ID NO: 396 - protein, 728 aa, Adeno-associated virus; identical to SEQ ID NO: 155

SEQ ID NO: 397 - protein, 728 aa, Adeno-associated virus; identical to SEQ ID NO: 155

SEQ ID NO: 398 - protein, 733 aa, Adeno-associated virus
MAADGHLPDWLEDNLSEGIREWWDLKPGAPKPKANQQKQDDGRGLVLPGYKYLGPFNGLDKGEPVNAADAAALEHDKAYDQQLKAGDNPYLRYNHADAEFQERLQEDTSFGGNLGRAVFQAKKRVLEPLGLVEEGAKTAPGKKRPIESPDSSTGIGKKGQQPAKKKLNFGQTGDSESVPDPQPIGEPPAGPSGLGSGTMAAGGGAPMADNNEGADGVGSSSGNWHCDSTWLGDRVITTSTRTWALPTYNNHLYKQISNGTSGGSTNDNTYFGYSTPWGYFDFNRFHCHFSPRDWQRLINNSWGFRPKRLNFKLFNIQVKEVTQNEGTKTIANNLTSTIQVFTDSEYQLPYVLGSAHQGCLPPFPADVFMIPQYGYLTLNNGSQAVGRSSFYCLEYFPSQMLRTGNNFEFSYQFEDVPFHSSYAHSQSLDRLMNPLIDQYLYYLSRTQSTGGTAGTQQLLFSQAGPNNMSAQAKNWLPGPCYRQQRVSTTLSQNNNSNFAWTGATKYHLNGRDSLVNPGVAMATHKDDEERFFPSSGVLMFGKQGAGKDNVDYSSVMLTSEEEIKTTNPVATEQYGVVADNLQQQNAAPIVGAVNSQGALPGMVWQNRDVYLQGPIWAKIPHTDGNFHPSPLMGGFGLKHPPPQILIKNTPVPADPPTTFSQAKLASFITQYSTGQVSVEIEWELQKENSKRWNPEIQYTSNYYKSTNVDFAVNTEGTYSEPRPIGTRYLTRNL

SEQ ID NO: 399 - DNA, 3113 bp, Adeno-associated virus
gaattcgccctttctacggctgcgtcaactggaccaatgagaactttcccttcaacgattgcgtcgacaagatggtgatctggtgggaggagggcaagatgacggccaaggtcgtggagtccgccaaggccattctcggcggcagcaaggtgcgcgtggaccaaaagtgcaagtcgtccgcccagatcgatcccacccccgtgatcgtcacttccaacaccaacatgtgcgccgtgattgacgggaacagcaccaccttcgagcaccagcagccgttacaagaccggatgttcaaatttgaactcacccgccgtctggagcatgactttggcaaggtgacaaagcaggaagtcaaagagttcttccgctgggcgcaggatcacgtgaccgaggtggcgcatgagttctacgtcagaaagggtggagccaacaagagacccgcccccgatgacgcggataaaagcgagcccaagcgggcctgcccctcagtcgcggatccatcgacgtcagacgcggaaggagctccggtggactttgccgacaggtaccaaaacaaatgttctcgtcacgcgggcatgcttcagatgctgcttccctgcaagacatgcgagagaatgaatcagaatttcagcatttgcttcacgcacgggaccagagactgttcagaatgtttccccggcgtgtcagaatctcaaccggtcgtcagaaagaggacgtatcggaaactctgtgccattcatcatctgctggggcgggctcccgagattgcttgctcggcctgcgatctggtcaacgtggacctggatgactgtgtttctgagcaataaatgacttaaaccaggtatggctgccgatggtcatcttccagattggctcgaggacaacctctctgagggcattcgcgagtggtgggacttgaaacctggagccccgaaacccaaagccaaccagcaaaagcaggacgacggccggggtctggtgcttcctggctacaagtacctcggacccttcaacggactcgacaagggggagcccgtcaacgcggcggacgcagcggccctcgagcacgacaaggcctacgaccagcagctcaaagcgggtgacaatccgtacctgcggtataaccacgccgacgccgagtttcaggagcgtcttcaagaagatacgtcttttgggggcaacctcgggcgagcagtcttccaggccaagaagcgggttctcgaacctctcggtctggttgaggaaggcgctaagacggctcctggaaagaagagacccatagaatcccccgactcctccacgggcatcggcaagaaaggccagcagcccgctaaaaagaagctcaactttgggcagactggcgactcagagtcagtgcccgaccctcaaccaatcggagaaccccccgcaggcccctctggtctgggatctggtacaatggctgcaggcggtggcgctccaatggcagacaataacgaaggcgccgacggagtgggtagttcctcaggaaattggcattgcgattccacatagctgggcgacagagtcatcaccaccagcacccgaacctgggccctccccacctacaacaaccacctctacaagcaaatctccaacgggacatcgggaggaagcaccaacgacaacacctacttcggctacagcaccccctgggggtattttgactttaacagattccactgccacttctcaccacgtgactggcagcgactcatcaacaacagctggggattccggcccaagagactcaacttcaagctcttcaacatccaggtcaaggaggtcacgcagaatgaaggcaccaagaccatcgccaataaccttaccagcacgattcaggtctttacggactcggaataccagctcccgtacgtcctcggctctgcgcaccagggctgcctgcctccgttcccggcggacgtcttcatgattcctcagtacgggtacctgactctgaacaacggcagtcaggccgtgggccgttcctccttctactgcctggagtactttccttctcaaatgctgagaacgggcaacaactttgagttcagctaccagtttgaggacgtgccttttcacagcagctacgcgcacagccaaagcctggaccggctgatgaaccccctcatcgaccagtacctgtactacctgtctcggactcagtccacgggaggtaccgcaggaactcagcagttgctattttctcaggccgggcctaataacatgtcggctcaggccaaaaactggctacccgggccctgctaccggcagcaacgcgtctccacgacactgtcgcaaaataacaacagcaactttgcttggaccggtgccaccaagtatcatctgaatggcagagactctctggtaaatcccggtgtcgctatggcaacgcacaaggacgacgaagagcgattttttccatccagcggagtcttgatgtttgggaaacagggagctggaaaagacaacgtggactatagcagcgttatgctaaccagtgaggaagaaatcaaaaccaccaacccagtggccacagaacagtacggcgtggtggccgataacctgcaacagcaaaacgccgctcctattgtaggggccgtcaacagtcaaggagccttacctggcatggtctggcagaaccgggacgtgtacctgcagggtcctatctgggccaagattcctcacacggacggcaactttcatccttcgccgctgatgggaggctttggactgaaacacccgcctcctcagatcctgattaagaatacacctgttcccgcggatcctccaactaccttcagtcaagccaagctggcgtcgttcatcacgcagtacagcaccggacaggtcagcgtggaaattgaatgggagctgcagaaagagaacagcaagcgctggaacccagagattcagtatacttccaactactacaaatctacaaatgtggactttgctgtcaatactgagggtacttattcagagcctcgccccattggcacccgttacctcacccgtaacctgtaattgcctgttaatcaataaaccggttaattcgtttcagttgaactttggtctctgcgaagggcgaattc

SEQ ID NO: 400 - protein, 731 aa, Adeno-associated virus
MAADGYLPDWLEDNLSEGIREWWDLKPGAPKPKANQQKQDDGRGLVLPGYKYLGPFNGLDKGEPVNEADAAALEHDKAYDKQLEQGDNPYLKYNHADAEFQERLQEDTSFGGNLGRAVFRAKKRVLEPLGLVEEGAKTAPGKKRPIESPDSSTGIGKKGQQPAKKKLNFGQTGDSESVPDPQPLGEPPAAPSGLGSGTMAAGGGAPMADNNEGADGVGNASGNWHCDSTWLGDRVITTSTRTWALPTYNNHLYKQISSQSGATNDNHFFGYSTPWGYFDFNRFHCHFSPRDWQRLINNNRGFRPRKLRFKLFNIQVKEVTTNDGVTTIANNLTSTIQVFSDSEYQLPYVLGSAHQGCLPPFPADVFMIPQYGYLTLNNGSQSVGRSSFYCLEYFPSQMLRTGNNFEFSYQFEDVPFHSSYAHSQSLDRLMNPLIDQYLYYLSRTQSTGGTAGTQQLLFSQAGPNNMSAQAKNWLPGPCYRQQRVSTTLSQNNNSNFAWTGATKYHLNGRDSLVNPGVAMATHKDDEERFFPSSGVLMFGKQGAGKDNVDYSSVMLTSEEEIKTTNPVATEQYGVVADNLQQQNAAPIVGAVNSQGALPGMAWQNRDVYLQGPIWAKIPHTDGNFHPSPLMGGFGLKHPPPQILIKNTPVPADPPTTFSQAKLASFITQYSTGQVSVEIEWELQKENSKRWNPEIQYTSNYYKSTNVDFAVNTEGTYSEPRPIGTRYLTRNL

SEQ ID NO: 401 - DNA, 3106 bp, Adeno-associated virus
gaattcgcccttctacggctgcgtcaactggaccaatgagaactttcccttcaacgattgcgtcgacaagatggtgatctggtgggaggagggcaagatgacggccaaggtcgtggagtccgccaaggccattctcggcggcagcaaggtgcgcgtggaccaaaagtgcaagtcgtccgcccagatcgaccccacccccgtgatcgtcacctccaacaccaacatgtgcgccgtgattgacgggaacagcaccaccttcgagcaccagcagccgttgcaggaccggatgttcaaatttgaactcacccgccgtctggagcatgactttggcaaggcgacaaagcaggaagtcaaagagttcttccgctgggcgcaggatcacgtgaccgaggtggcgcatgagttctacgtcagaaagggtggagccaacaagagacccgcccccgatgacgcggataaaagcgagcccaagcgggcccgcccctcagtcgcggatccatcgacgtcagacgcggaaggagctccggtggactttgccgacaggtaccaaaacaaatgttctcgtcacgcgggcatgcttcagatgctgtttccctgcaaaacatgcgagagaatgaatcagaatttcaacatttgcttcacgcacgggaccagagactgttcagaatgtttccccggcgtgtcagaatctcaaccggtcgtcagaaagaggacgtatcggaaactctgtgccattcatcatctgctggggcgggctcccgagattgcttgctcggcctgcgatctggtcaacgtggacctggatgactgtgtttctgagcaataaatgacttaaaccaggtatggctgccgatggttatcttccagattggctcgaggacaacctctctgagggcattcgcgagtggtgggacttgaaacctggagccccgaaacccaaagccaaccagcaaaagcaggacgacggccggggtctggtgcttcctggctacaagtacctcggacccttcaacggactcgacaagggagagccggtcaacgaggcagacgccgcggccctcgagcacgacaaggcctacgacaagcagctcgagcagggggacaacccgtacctcaagtacaaccacgccgacgccgagtttcaggagcgtcttcaagaagatacgtcttttgggggcaacctcgggcgagcagtcttccgggccaagaagcgggttctcgaacctctcggtctggttgaggaaggcgctaagacggctcctggaaagaagagacccatagaatcccccgactcctccacgggcatcggcaagaaaggccagcagcccgctaaaaagaagctcaactttgggcagactggcgactcagagtcagtgcccgacccccaacctctcggagaacctcccgccgcgccctcaggtctgggatctggtacaatggctgcaggcggtggcgcaccaatggcagacaataacgaaggcgccgacggagtgggtaatgcctccggaaattggcattgcgattccacatggctgggcgacagagtcatcaccaccagcacccgcacctgggccctgcccacctacaacaaccacctctacaagcagatatcaagtcagagcggggctaccaacgacaaccacttcttcggctacagcaccccctggggctattttgacttcaacagattccactgccacttctcaccacgtgactggcagcgactcatcaacaacaaccggggattccggcccagaaagctgcggttcaagttgttcaacatccaggtcaaggaggtcacgacgaacgacggcgttacgaccatcgctaataaccttaccagcacgattcaggtcttctcggactcggagtaccaactgccgtacgtcctcggctctgcgcaccagggctgcctccctccgttccctgcggacgtgttcatgattcctcagtacggatatctgactctaaacaacggcagtcagtctgtgggacgttcctccttctactgcctggagtactttccttctcagatgctgagaacgggcaataactttgaattcagctaccagtttgaggacgtgccctttcacagcagctacgcgcacagccaaagcctggaccggctgatgaaccccctcatcgaccagtacctgtactacctgtctcggactcagtccacgggaggtaccgcaggaactcagcagttgctattttctcaggccgggcctaataacatgtcggctcaggccaaaaactggctacccgggccctgctaccggcagcaacgcgtctccacgacactgtcgcaaaataacaacagcaactttgcttggaccggtgccaccaagtatcatctgaatggcagagactctctggtaaatcccggtgtcgctatggcaacgcacaaggacgacgaagagcgattttttccatccagcggagtcttgatgtttgggaaacagggagctggaaaagacaacgtggactatagcagcgttatgctaaccagtgaggaagaaatcaaaaccaccaacccagtggccacagaacagtacggcgtggtggccgataacctgcaacagcaaaacgccgctcctattgtaggggccgtcaacagtcaaggagccttacctggcatggcctggcagaaccgggacgtgtacctgcagggtcctatctgggccaagattcctcacacggacggcaactttcatccttcgccgctgatgggaggctttggactgaaacacccgcctcctcagatcctgattaagaatacacctgttcccgcggatcctccaactaccttcagtcaagccaagctggcgtcgttcatcacgcagtacagcaccggacaggtcagcgtggaaattgaatgggagctgcagaaagagaacagcaagcgctggaacccagagattcagtatacttccaactactacaaatctacaaatgtggactttgctgtcaatactgagggtacttattcagagcctcgccccattggcacccgttacctcacccgtaacctgtaattgcctgttaatcaataaaccggttaattcgtttcagttgaactttggtctctgcgaagggcgaattc

SEQ ID NO: 402 - protein, 738 aa, Adeno-associated virus
MAADGYLPDWLEDNLSEGIREWWDLKPGAPKPKANQQKQDDGRGLVLPGYKYLGPFNGLDKGEPVNEADAAALEHDKAYDKQLEQGDNPYLKYNHADAEFQERLQEDTSFGGNLGRAVFQAKKRVLEPLGLVEEGAKTAPGKKRPVEPSPQRSPDSSTGIGKTGQQPAKKRLNFGQTGDSESVPDPQPIGEPPAGPSGLGSGTMAAGGGAPMADNNEGADGVGSSSGNWHCDSTWLGDRVITTSTRTWALPTYNNHLYKQISNGTSGGSTNDNTYFGYSTPWGYFDFNRFHCHFSPRDWQRLINNNWGFRPKRLNFKLFNIQVKEVTQNEGTKTIANNLTSTIQVFTDSEYQLPYVLGSAHQGCLPPFPADVFMIPQYGYLTLNNGSQAVGRSSFYCLEYFPSQMLRTGNNFEFSYQFEDVPFHSSYAHSQSLDRLMNPLIDQYLYYLSRTQSTGGTAGTQQLLFSQAGPNNMSAQAKNWLPGPCYRQQRVSTTLSQNNNSNFAWTGATKYHLNGRDSLVNPGVAMATHKDDEERFFPSSGVLMFGKQGAGKDNVDYSSVMLTSEEEIKTTNPVATEQYGVVADNLQQQNAAPIVGAVNSQGALPGMVWQNRDVYLQGPIWAKIPHTDGNFHPSPLMGGFGLKHPPPQILIKNTPVPADPPTTFSQAKLASFITQYSTGQVSVEIEWELQKENSKRWNPEIQYTSNYYKSTNVDFAVNTEGTYSEPRPIGTRYLTRNL

SEQ ID NO: 403 - DNA, 3197 bp, Adeno-associated virus
gaattcgccctttctacggctgcgtcaactggaccaatgagaactttcccttcaacgattgcgtcgacaagatggtgatctggtgggaggagggcaagatgacggccaaggtcgtggagtccgccaaggccattctcggcggcagcaaggtgcgcgtggaccaaaagtgcaagtcgtccgcccagatcgaccccacccccgtgatcgtcacctccaacaccaacatgtgcgccgtgattgacgggaacagcaccaccttcgagcaccagcagccgttacaagaccggatgttcaaatttgaactcacccgccgtctggagcacgactttggcaaggtgacaaagcaggaagtcaaagagttcttccgctgggcgcaggatcacgtgaccgaggtggcgcatgagttctacgtcagaaagggtggagccaacaagagacccgcccccgatgacgcggataaaagcgagcccaagcgggcctgcccctcagtcgcggatccatcgacgtcagacgcggaaggagctccggtggactttgccgacaggtaccaaaacaaatgttctcgtcacgcgggcatgcttcagatgctgtttccctgcaagacatgcgagagaatgaatcagaatttcaacatttgcttcacgcacgggaccagagactgttcagaatgtttccccggcgtgtcagaatctcaaccggtcgtcagaaagaggacgtatcggaaactctgtgccattcatcatctgctggggcgggctcccgagattgcttgctcggcctgcgatctggtcaacgtggacctggatgactgtgtttctgagcaataaatgacttaaaccaggtatggctgccgatggttatcttccagattggctcgaggacaacctctctgagggcattcgcgagtggtgggacttgaaacctggagccccgaaacccaaagccaaccagcaaaagcaggacgacggccggggtctggtgcttcctggctacaagtacctcggacccttcaacggactcgacaagggagagccggtcaacgaggcagacgccgcggccctcgagcacgacaaggcctacgacaagcagctcgagcagggggacaacccgtacctcaagtacaaccacgccgacgccgagtttcaggagcgtcttcaagaagatacgtcttttgggggcaacctcgggcgagcagtcttccaggccaagaagcgggttctcgaacctctcggtctggttgaggaaggcgctaagacggctcctggaaagaagagaccggtagagccatcaccccagcgttctccagactcctctacgggcatcggcaagacaggccagcagcccgcgaaaaagagactcaactttgggcagactggcgactcagagtcagtgcccgaccctcaaccaatcggagaaccccccgcaggcccctctggtctgggatctggtacaatggctgcaggcggtggcgctccaatggcagacaataacgaaggcgccgacggagtgggtagttcctcaggaaattggcattgcgattccacatggctgggcgacagagtcatcaccaccagcacccgaacctgggccctccccacctacaacaaccacctctacaagcaaatctccaacgggacatcgggaggaagcaccaacgacaacacctacttcggctacagcaccccctgggggtattttgactttaacagattccactgccacttctcaccacgtgactggcagcgactcatcaacaacaactggggattccggcccaagagactcaacttcaagctcttcaacatccaggtcaaggaggtcacgcagaatgaaggcaccaagaccatcgccaataaccttaccagcacgattcaggtctttacggactcggaataccagctcccgtacgtcctcggctctgcgcaccagggctgcctgcctccgttcccggcggacgtcttcatgattcctcagtacgggtacctgactctgaacaacggcagtcaggccgtgggccgttcctccttctactgcctggagtactttccttctcaaatgctgagaacgggcaacaactttgagttcagctaccagtttgaggacgtgccttttcacagcagctacgcgcacagccaaagcctggaccggctgatgaaccccctcatcgaccagtacctgtactacctgtctcggactcagtccacgggaggtaccgcaggaactcagcagttgctattttctcaggccgggcctaataacatgtcggctcaggccaaaaactggctacccgggccctgctaccggcagcaacgcgtctccacgacactgtcgcaaaataacaacagcaactttgcttggaccggtgccaccaagtatcatctgaatggcagagactctctggtaaatcccggtgtcgctatggcaacgcacaaggacgacgaagagcgattttttccatccagcggagtcttgatgtttgggaaacagggagctggaaaagacaacgtggactatagcagcgttatgctaaccagtgaggaagaaatcaaaaccaccaacccagtggccacagaacagtacggcgtggtggccgataacctgcaacagcaaaacgccgctcctattgtaggggccgtcaacagtcaaggagccttacctggcatggtctggcagaaccgggacgtgtacctgcagggtcctatctgggccaagattcctcacacggacggcaactttcatccttcgccgctgatgggaggctttggactgaaacacccgcctcctcagatcctgattaagaatacacctgttcccgcggatcctccaactaccttcagtcaagccaagctggcgtcgttcatcacgcagtacagcaccggacaggtcagcgtggaaattgaatgggagctgcagaaagagaacagcaagcgctggaacccagagattcagtatacttccaactactacaaatctacaaatgtggactttgctgtcaatactgagggtacttattcagagcctcgccccattggcacccgttacctcacccgtaacctgtaattgcctgttaatcaataaaccggttaattcgtttcagttgaactttggtctctgcgaagggcgaattcgtttaaacctgcaggactagtccctttagtgagggttaattctgagcttggcgtaatcatgggtcatag

SEQ ID NO: 404 - protein, 735 aa, Adeno-associated virus
MAADGYLPDWLEDNLSEGIREWWDLKPGAPKPKANQQKQDDGRGLVLPGYKYLGPFNGLDKGEPVNEADAAALEHDKAYDKQLEQGDNPYLKYNHADAEFQERLQEDTSFGGNLGRAVFQAKKRVLEPLGLVEEGAKTAPGKKRPVEPSPQRSPDSSTGIGKTGQQPAKKRLNFGQTGDSESVPDPQPIGEPPAGPSGLGSGTMAAGGGAPMADNNEGADGVGSSSGNWHCDSTWLGDRVITTSTRTWALPTYNNHLYKQISNGTSGGSTNDNTYFGYSTPWGYFDFNRFHCHFSPRDWQRLINNNWGFRPRKLRFKLFNIQVKEVTTDDGVTTIANNLTSTIQVFSDSEYQLPYVLGSAHQGCLPPFPADVFMIPQYGYLTLNNGSQSVGRSSFYCLEYFPSQMLRTGNNFEFSYTFEEVPFHSSYAHSQSLDRLMNPLIDQYLYYLARTQSTTGSTRELQFHQAGPNTMAEQSKNWLPGPCYRQQRLSKNIDSNNNSNFAWTGATKYHLNGRNSLTNPGVAMATNKDDEDQFFPINGVLVFGKTGAANKTTLENVLMTSEEEIKTTNPVATEEYGVVSSNLQSSTAGPQTQTVNSQGALPGMVWQNRDVYLQGPIWAKIPHTDGNFHPSPLMDGFGLKHPPPQILIKNTPVPANPPEVFTPAKFASFITQYSTGQVSVEIEWELQKENSKRWNPEIQYTSNYAKSNNVEFAVNNEGVYTEPRPIGTRYLTRNL

SEQ ID NO: 405 - DNA, 3276 bp, Adeno-associated virus
gaattcgcccttcgcagagaccaaagttcaactgaaacgaattaaccggtttattgattaacaggcaattacaggttacgggtgaggtaacgggtgccaatggggcgaggctcagtataaaccccttcgttgttgacagcaaattccacattattagacttggcataatttgaggtgtactgaatctctggattccagcgtttgctgttttctttctgcagttcccactcgatctccacgctgacctggccggtgctgtactgcgtgataaatgaggcaaacttggcaggagtaaacacctctggaggattagcaggtaccggggtgtttttgatgagaatttgaggaggcgggtgtttgagtccaaatccgtccatcaggggagacgggtgaaagttgccgtccgtgtgaggaattttggcccagatgggaccctgcaggtacacgtcccggttctgccagaccatgccgggcagagccccctggctgttgacagtctgtgtctggggtccggccgtagacgattgcaggttgctggagaccacaccgtattcttctgtagccacgggattggtggttttgatctcctcctcgctggtcattagcacgttttccagcgttgtcttgttggcagcccccgttttgccaaaaaccagcactccgttgatgggaaagaactggtcctcgtcgtccttgttggtggccatggctacgcccgggttggttaatgaatttctaccattcagatggtatttagtggccccggtccaggcaaagttactgttgttgttgctgtctatgttttttgacagtctctgctgccgataacagggtccgggcagccagttctttgattgctcggccatggtgttgggcccagcctgatggaactgcagctcccttgtggaccccgtagtgctctgggtccgggccaggtagtacaggtactggtcgatgaggggattcatcagccggtccaggctctggctatgcgcatagctgctgtggaaaggcacttcctcaaaggtgtagctgaattcaaagttattgcccgttctcagcatctgagaaggaaagtactccaggcagtagaaggaggaacgtcccacagactgactgccgttgtttagagtcagatatccgtactgaggaatcatgaacacgtccgcagggaacggagggaggcagccctggtgcgcagagccgaggacgtacggcagttggtactccgagtccgagaagacctgaatcgtgctggtaaggttattagcgatggtcgtaacgccgtcgtccgtcgtgacctccttgacctggatgttgaacaacttgaaccgcagctttctgggccggaatccccagttgttgttgatgagtcgctgccagtcacgtggtgagaagtggcagtggaatctgttaaagtcaaaatacccccagggggtgctgtagccgaagtaggtgttgtcgttggtgcttcctcccgatgtcccgttggagatttgcttgtagaggtggttgttgtaggtggggagggcccaggttcgggtgctggtggtgatgactctgtcgcccagccatgtggaatcgcaatgccaatttcctgaggaactacccactccgtcggcgccttcgttattgtctgccattggagcgccaccgcctgcagccattgtaccagatcccagaccagaggggcctgcggggggttctccgattggttgagggtcgggcactgactctgagtcgccagtctgcccaaagttgagtctctttttcgcgggctgctggcctgtcttgccgatgcccgtagaggagtctggagaacgctggggtgatggctctaccggtctcttctttccaggagccgtcttagcgccttcctcaaccagaccgagaggttcgagaacccgcttcttggcctggaagactgctcgcccgaggttgcccccaaaagacgtatcttcttgaagacgctcctgaaactcggcgtcggcgtggttgtacttgaggtacgggttgtccccctgctcgagctgcttgtcgtaggccttgtcgtgctcgagggccgcggcgtctgcctcgttgaccggctctcccttgtcgagtccgttgaagggtccgaggtacttgtagccaggaagcaccagaccccggccgtcgtcctgcttttgctggttggctttgggtttcggggctccaggtttcaagtcccaccactcgcgaatgccctcagagaggttgtcctcgagccaatctggaagataaccatcggcagccatacctggtttaagtcatttattgctcagaaacacagtcatccaggtccacgttgaccagatcgcaggccgagcaagcaatctcgggagcccgccccagcagatgatgaatggcacagagtttccgatacgtcctctttctgacgaccggttgagattctgacacgccggggaaacattctgaacagtctctggtcccgtgcgtgaagcaaatgttgaaattctgattcattctctcgcatgtcttgcagggaaacagcatctgaagcatgcccgcgtgacgagaacacttgttttggtacctgtcggcaaagtccaccggagctccttccgcgtctgacgtcgatggatgcaaaatgtcgcaaaagcactcacgtgacagctaatacaggaccactcccctatgacgtgatttacgtcagcgctatgcccgcgtgacgagaacatttgttttggtacctgtcggcaaagtccaccggagctccttccgcgtctgacgtcgatggatccgcgactgaggggcaggcccgcttgggctcgcttttatccgcgtcatcgggggcgggtctcttgttggctccaccctttctgacgtagaactcatgcgccacctcggtcacgtgatcctgcgcccagcggaagaactctttgacttcctgctttgtcaccttgccaaagtcatgctccagacggcgggtgagttcaaatttgaacatccggtcctgcaacggctgctggtgctcgaaggtggtgctgttcccgtcaatcacggcgcacatgttggtgttggaagtgacgatcacgggggtgggatcgatctgggcggaagacttgcacttttggtccacgcgcaccttgctgccgccgagaatggccttggcggactccacgaccttggccgtcatcttgccctcctcccaccagatcaccatcttgtcgacgcaatcgttgaagggaaagttctcattggtccagttgacgcagccgtagaaagggcgaattc

SEQ ID NO: 406 - protein, 738 aa, Adeno-associated virus; identical to SEQ ID NO: 71

SEQ ID NO: 407 - protein, 738 aa, Adeno-associated virus
MAADGYLPDWLEDNLSEGIREWWDLKPGAPKPKANQQKQDDGRGLVLPGYKYLGPFNGLDKGEPVNAADAAALEHDKAYDQQLKAGDNPYLRYNHADAEFQERLQEDTSFGGNLGRAVFQAKKRVLEPLGLVEEGAKTAPGKKRPVEPSPQRSPDSSTGIGKKGHQPARKRLNFGQTGDSESVPDPQPIGEPPAGPSGLGSGTMAAGGGAPMADNNEGADGVGSSSGNWHCDSTWLGDRVITTSTRTWALPTYNNHLYKQISNGTSGGSTNDNTYFGYSTPWGYFDFNRFHCHFSPRDWQRLINNNWGFRPKRLNFKLFNIQVKEVTQNEGTKTIANNLTSTIQVFTDSEYQLPYVPGSAHQGCLPPFPADVFMIPQYGYLTLNNGSQAVGRSSFYCLEYFPSQMLRTGNNFEFSYTFEDVPFHSSYAHSQSLDRLMNPLIDQYLYYLSRTQSTGGTQGTQQLLFSQAGPANMSAQAKNWLPGPCYRQQRVSTTLSQNNNSNFAWTGATKYHLNGRDSLVNPGVAMATHKDDEERFFPSSGVLMFGKQGAGKDNVDYSSVMLTSEEEIKTTNPVATEQYGVVADNLQQTNGAPIVGTVNSQGALPGMVWQNRDVYLQGPIWAKIPHTDGNFHPSPLMGGFGLKHPPPQILIKNTPVPADPPTTFSQAKLASFITQYSTGQVSVEIEWELQKENSKRWNPEIQYTSNYYKSTNVDFAVNTEGTYSEPRPIGTRYLTRNL

SEQ ID NO: 408 - protein, 738 aa, Adeno-associated virus; identical to SEQ ID NO: 69

SEQ ID NO: 409 - protein, 728 aa, Adeno-associated virus
MAADGYLPDWLEDNLSEGIREWWDLKPGAPKPKANQQKQDDGRGLVLPGYKYLGPFNGLDKGEPVNEADAAALEHDKAYDKQLEQGDNPYLKYNHADAEFQERLQEDTSFGGNLGRAVFQAKKRVLEPLGLVEEGAKTAPGKKRPIESPDSSTGIGRKGQQPAKKKLNFGQTGDSESVPDPQPIGEPPAGPSGLGSGTMAAGGGAPMADNNEGADGVGNASGNWHCDSTWLGDRVITTSTRTWALPTYNNHLYKQISSQSGATNDNHFFGYSTPWGYFDFNRFHCHFSPRDWQRLINNNWGFRPRKLRFKLFNIQVKEVTTNDGVTTIANNLTSTIQVFSDSEYQLPYVLGSAHQGCLPPFPADVFMIPQYGYLTLNNGSQSVGRSSFYCLEYFPSQMLRTGNNFEFSYTFEEVPFHSSYAHSQSLDRLMNPLIDQYLYYLARTQSTTGSTRELQFHQAGPNTMAEQSKNWLPGPCYRQQRLSKNIDSNNNSNFAWTGATKYHLNGRNSLTNPGVAMATNKDDEDQFFPINGVLVFGKTGAANKTTLENVLMTSEEEIKTTNPVATEEYGVVSSNLQSSTAGPQTQTVNSQGALPGMVWQNRDVYLQGPIWAKIPHTDGNFHPSPLMGGFGLKHPPPQILIKNTPVPANPPEVFTPAKFASFITQYSTGQVSVEIEWELQKENSKRWNPEIQYTSNYAKSNNVEFAVNNEGVYTEPRPIGTRYLTRNL

SEQ ID NO: 410 - DNA, 2489 bp, Adeno-associated virus
gaattcgccctttctacggctgcgtcaactggaccaatgagaactttcccttcaacgattgcgtcgacaagatggtgatctggtgggaggagggcaagatgacggccaaggtcgtgaagtccgccaaggccattcatcatctgctggggcgggctcccgagattgcttgctcggcctgcgatctggtcaacgtggacctggatgactgtgtttctgagcaataaatgacttaaaccaggtatggctgccgatggttatcttccagattggctcgaggacaacctctctgagggcattcgcgagtggtgggacttgaaacctggagccccgaaacccaaagccaaccagcaaaagcaggacgacggccggggtctggtgcttcctggctacaagtacctcggacccttcaacggactcgacaagggagagccggtcaacgaggcagacgccgcggccctcgagcacgacaaggcctacgacaagcagctcgagcagggggacaacccgtacctcaagtacaaccacgccgacgccgagtttcaggagcgtcttcaagaagatacgtcttttgggggcaacctcgggcgagcagtcttccaggccaagaagcgggttctcgaacctctcggtctggttgaggaaggcgctaagacggctcctggaaagaagagacccatagaatcccccgactcctccacgggcatcggcaggaaaggccagcagcccgctaaaaagaagctcaactttgggcagactggcgactcagagtcagtgcccgaccctcaaccaatcggagaaccccccgcaggcccctctggtctgggatctggtacaatggctgcaggcggtggcgctccaatggcagacaataacgaaggcgccgacggagtgggtaatgcctccggaaattggcattgcgattccacatggctgggcgacagagtcatcaccaccagcacccgcacctgggccctgcccacctacaacaaccacctctacaagcagatatcaagtcagagcggggctaccaacgacaaccacttcttcggctacagcaccccctggggctattttgacttcaacagattccactgccacttctcaccacgtgactggcagcgactcatcaacaacaactggggattccggcccagaaagctgcggttcaagttgttcaacatccaggtcaaggaggtcacgacgaacgacggcgttacgaccatcgccaataaccttaccagcacgattcaggtcttctcggactcggagtaccaactgccgtacgtcctcggctctgcgcaccagggctgcctccctccgttccctgcggacgtgttcatgattcctcagtacggatatctgactctaaacaacggcagtcagtctgtgggacgttcctccttctactgcctggagtactttccttctcagatgctgagaacgggcaataactttgaattcagctacacctttgaggaagtgcctttccacagcagctatgcgcacagccagagcctggaccggctgatgaatcccctcatcgaccagtacctgtactacctggcccggacccagagcactacggggtccacaagggagctgcagttccatcaggctgggcccaacaccatggccgagcaatcaaagaactggctgcccggaccctgttatcggcagcagagactgtcaaaaaacatagacagcaacaacaacagtaactttgcctggaccggggccactaaataccatctgaatggtagaaattcattaaccaacccgggcgtagccatggccaccaacaaggacgacgaggaccagttctttcccatcaacggagtgctggtttttggcaaaacgggggctgccaacaagacaacgctggaaaacgtgctaatgaccagcgaggaggagatcaaaaccaccaatcccgtggctacagaagaatacggtgtggtctccagcaacctgcaatcgtctacggccggaccccagacacagactgtcaacagccagggggctctgcccggcatggtctggcagaaccgggacgtgtacctgcagggtcccatctgggccaaaattcctcacacggacggcaactttcacccgtctcccctgatgggcggatttggactcaaacacccgcctcctcaaattctcatcaaaaacaccccggtacctgctaatcctccagaggtgtttactcctgccaagtttgcctcatttatcacgcagtacagcaccggccaggtcagcgtggagatcgagtgggaactgcagaaagaaaacagcaaacgctggaatccagagattcagtacacctcaaattatgccaagtctaataatgtggaatttgctgtcaacaacgaaggggtttatactgagcctcgccccattggcacccgttacctcacccgtaacctgtaattgcctgttaatcaataaaccggttaattcgtttcagttgaactttggtcaagggcgaattc

SEQ ID NO: 411 - protein, 728 aa, Adeno-associated virus
MAADGYLPDWLEDNLSEGIREWWDLKPGAPKPKANQQKQDDGRGLVLPGYKYLGPFNGLDKGEPVNAADAAALEHDKAYDQQLKAGDNPYLRYNHADAEFQERLQEDTSFGGNLGRAVFQAKKRVLEPLGLVEEGAKTAPGKKRPIESPDSSTGIGKKGQQPAKKKLNFGQTGDSESVPDPQPIGEPPAGPSGLGSGTMAAGGGAPMADNNEGADGVGNASGNWHCDSTWLGDRVITTSTRTWALPTYNNHLYKQISSQSGATNDNHFFGYSTPWGYFDFNRFHCHFSPRDWQRLINNNWGFRPRKLRFKLFNIQVKEVTTNDGVTTIANNLTSTIQVFSDSEYQLPYVLGSAHQGCLPPFPADVFMIPQYGYLTLNNGSQSVGRSSFYCLEYFPSQMLRTGNNFEFSYTFEEVPFHSSYAHSQSLDRLMNPLIDQYLYYLARTQSTTGSTRELQFHQAGPNTMAEQSKNWLPGPCYRRQRLSKDIDSNNNSNFAWTGATKYHLNGRNSLTNPGVAMATNKDDEDQFFPINGVLVFGKTGAANKTTLENVLMTSEEEIKTTNPVATEEYGVVSSNLQSSTAGPQTQTVNSQGALPGMVWQNRDVYLQGPIWAKIPHTDGNFHPSPLMGGFGLKHPPPQILIKNTPVPANPPEVFTPAKFASFITQYSTGQVSVEIEWELQKENSKRWNPEIQYTSNYAKSNNVEFAVNNEGVYTEPRPIGTRYLTRNL

SEQ ID NO: 412 - DNA, 3098 bp, Adeno-associated virus
gaattcgccctttctacggctgcgtcaactggaccaatgagaactttcccttcaacgattgcgtcgacaagatggtgatctggtgggaggagggcaagatgacggccaaggtcgtggagtccgccaaggccattctcggcggcagcaaggtgcgcgtggaccaaaagtgcaagtcttccgcccagatcgatcccacccccgtgatcgtcacttccaacaccaacatgtgcgccgtgattgacgggaacagcaccaccttcgagcaccagcagccgttacaagaccggatgttcaaatttgaactcacccgccgtctggagcacgactttggcaaggtgacaaagcaggaagtcaaagagttcttccgctgggcgcaggatcacgtgaccgaggtggcgcatgagttctacgtcagaaagggtggagccaacaagagacccgcccccgatgacgcggataaaagcgagcccaagcgggcctgcccctcagtcgcggatccatcgacgtcagacgcggaaggagctccggtggactttgccgacaggtaccaaaacaaatgttctcgtcacgcgggcatgcttcagatgctgtttccctgcaagacatgcgagagaatgaatcagaatttcaacatttgcttcacgcacgggaccggagactgttcagaatgtttccccggcgtgtcagaatctcaaccggtcgtcagaaagaggacgtatcggaaactctgtgccattcatcatctgctggggcgggctcccgagattgcttgctcggcctgcgatctggtcaacgtggacctggatgactgtgtttctgagcaataaatgacttaaaccaggtatggctgccgatggttatcttccagattggctcgaggacaacctctctgagggcattcgcgagtggtgggacttgaaacctggagccccgaaacccaaagccaaccagcaaaagcaggacgacggccggggtctggtgcttcctggctacaagtacctcggacccttcaacggactcgacaagggagagccggtcaacgcggcggacgcagcggccctcgagcacgacaaggcctacgaccagcagctcaaagcgggtgacaatccgtacctgcggtataaccacgccgacgccgagtttcaggagcgtcttcaagaagatacgtcttttgggggcaacctcgggcgagcagtcttccaggccaagaagcgggttctcgaacctctcggtctggttgaggaaggcgctaagacggctcctggaaagaagagacccatagaatcccccgactcctccacgggcatcggcaagaaaggccagcagcccgctaaaaagaagctcaactttgggcagactggcgactcagagtcagtgcccgaccctcaaccaatcggagaaccccccgcaggcccctctggtctgggatctggtacaatggctgcaggcggtggcgctccaatggcagacaataacgaaggcgccgacggagtgggtaatgcctccggaaattggcattgcgattccacatggctgggcgacagagtcatcaccaccagcacccgcacctgggccctgcccacctacaacaaccacctctacaagcagatatcaagtcagagcggggctaccaacgacaaccacttcttcggctacagcaccccctggggctattttgacttcaacagattccactgccacttctcaccacgtgactggcagcgactcatcaacaacaactggggattccggcccagaaagctgcggttcaagttgttcaacatccaggtcaaggaggtcacgacgaacgacggcgttacgaccatcgctaataaccttaccagcacgattcaggtcttctcggactcggagtaccaactgccgtacgtcctcggctctgcgcaccagggctgcctccctccgttccctgcggacgtgttcatgattcctcagtacggatatctgactctaaacaacggcagtcagtctgtgggacgttcctccttctactgcctggagtactttccttctcagatgctgagaacgggcaataactttgaattcagctacacctttgaggaagtgcctttccacagcagctatgcgcacagccagagcctggaccggctgatgaatcccctcatcgaccagtacctgtactacctggcccggacccagagcactacggggtccacaagggagctgcagttccatcaggctgggcccaacaccatggccgagcaatcaaagaactggctgcccggaccctgttatcggcggcagagactgtcaaaagacatagacagcaacaacaacagtaactttgcctggaccggggccactaaataccatctgaatggtagaaattcattaaccaacccgggcgtagccatggccaccaacaaggacgacgaggaccagttctttcccatcaacggagtgctggtttttggcaaaacgggggctgccaacaagacaacgctggaaaacgtgctaatgaccagcgaggaggagatcaaaaccaccaatcccgtggctacagaagaatacggtgtggtctccagcaacctgcaatcgtctacggccggaccccagacacagactgtcaacagccagggggctctgcccggcatggtctggcagaaccgggacgtgtacctgcagggtcccatctgggccaaaattcctcacacggacggcaactttcacccgtctcccctgatgggcggatttggactcaaacacccgcctcctcaaattctcatcaaaaacaccccggtacctgctaatcctccagaggtgtttactcctgccaagtttgcctcatttatcacgcagtacagcaccggccaggtcagcgtggagatcgagtgggaactgcagaaagagaacagcaaacgctggaatccagagattcagtacacctcaaattatgccaagtctaataatgtggaatttgctgtcaacaacgaaggggtttatactgagcctcgccccattggcacccgttacctcacccgtaacctgtaattacttgttaatcaataaaccggttgattcgtttcagttgaactttggtctctgcgaagggcgaattc

SEQ ID NO: 413 - protein, 685 aa, Adeno-associated virus
MAADGYLPDWLEDNLSEGIREWWDLKPGAPKPKANQQKQDDGRGLVLPGYKYLGPFNGLDKGEPVNEADAAALEHDKAYDKQLEQGDNPYLKYNHADAEFQERLQEDTSFGGNLGRAVFQAKKRVLEPLGLVEEGAKTAPGKKRPVEPSPQRSPDSSTGIGKTGQQPAKKRLNFGQTGDSESVPDPQPIGEPPAGPSGLGSGTMAAGGGAPMADNNEGADGVGSSSGNWHCDSTWLGDRVITTSTRTWALPTYNNHLYKQISNGTSGGSTNDNTYFGYSTPWGYFDFNRFHCHFSPRDWQRLINNNWGFRPKRLNFKLFNIQVKEVTQNEGTKTIANNLTSTIQVFTDSEYQLPYVLGSAHQGCLPPFPADVFMIPQYGYLTLNNGSQAVGRSSFYCLEYFPSQMLRTGNNFEFSYQFEDVPFHSSYAHSQSLDRLTNPLIDQYLYYLARTQSTTGSTRGLQFHQAGPNTMAEQSKNWLPGPCYRQQRLSKNIDSNNNSNFAWTGATKYHLNGRNSLTNPGVAMATNKDDEDQFFPINGVLVFGKTGAANKTTLENVLMTSEEEIKTTNPVATEEYGVVSSNLQSSTAGPQTQTVNSQGALPGMVWQNRDVYLQGPIWAKIPHTDGNFHPSPLMGGFGLKHPPPQILIKYTSNYYKSTNVDFAVNTEGTYSEPRPIGTRYLTRNL

SEQ ID NO: 414 - DNA, 2969 bp, Adeno-associated virus
gaattcgccctttctacggctgcgtcaactggaccaatgagaactttcccttcaacgattgcgtcgacaagatggtgatctggtgggaggagggcaagatgacggccaaggtcgtggagtccgccaaggccattctcggcggcagcaaggtgcgcgtggaccaaaagtgcaagtcgtccgcccagatcgaccccacccccgtgatcgtcacctccaacaccaacatgtgcgccgtgattgacgggaacagcaccaccttcgagcaccagcagccgttacaagaccggatgttcaaatttgaactcacccgccgtctggagcacgactttggcaaggtgacaaagcaggaagtcaaagagttcttccgctgggcgcaggatcacgtgaccgaggtggcgcatgagttctacgtcagaaagggtggagccaacaagagacccgcccccgatgacgcggataaaagcgagcccaagcgggcctgcccctcagtcgcggatccatcgacgtcagacgcggaaggagctccggtggactttgccgacaggtaccaaaacaaatgttctcgtcacgcgggcatgcttcagatgctgtttccctgcaagacatgcgagagaatgaatcagaatttcaacatttgcttcacgcacgggaccagagactgttcagaatgtttccccggcgtgtcagaatctcaaccggtcgtcagaaagaggacgtatcggaaactctgtgccattcatcatctgctggggcgggctcccgagattgcttgctcggcctgcgatctggtcaacgtggacctggatgactgtgtttctgagcaataaatgacttaaaccaggtatggctgccgatggttatcttccagattggctcgaggacaacctctctgagggcatccgcgagtggtgggacttgaaacctggagccccgaaacccaaagccaaccagcaaaagcaggacgacggccggggtctggtgcttcctggctacaagtacctcggacccttcaacggactcgacaagggagagccggtcaacgaggcagacgccgcggccctcgagcacgacaaggcctacgacaagcagctcgagcagggggacaacccgtacctcaagtacaaccacgccgacgccgagtttcaggagcgtcttcaagaagatacgtcttttgggggcaacctcgggcgagcagtcttccaggccaagaagcgggttctcgaacctctcggtctggttgaggaaggcgctaagacggctcctggaaagaagagaccggtagagccatcaccccagcgttctccagactcctctacgggcatcggcaagacaggccagcagcccgcgaaaaagagactcaactttgggcagactggcgactcagagtcagtgcccgaccctcaaccaatcggagaaccccccgcaggcccctctggtctgggatctggtacaatggctgcaggcggtggcgctccaatggcagacaataacgaaggcgccgacggagtgggtagttcctcaggaaattggcattgcgattccacatggctgggcgacagagtcatcaccaccagcacccgaacctgggccctccccacctacaacaaccacctctacaagcaaatctccaacgggacatcgggaggaagcaccaacgacaacacctacttcggctacagcaccccctgggggtattttgactttaacagattccactgccacttctcaccacgtgactggcagcgactcatcaacaacaactggggattccggcccaagagactcaacttcaagctcttcaacatccaggtcaaggaggtcacgcagaatgaaggcaccaagaccatcgccaataaccttaccagcacgattcaggtctttacggactcggaataccagctcccgtacgtcctcggctctgcgcaccagggctgcctgcctccgttcccggcggacgtcttcatgattcctcagtacgggtacctgactctgaacaacggcagtcaggccgtgggccgttcctccttctactgcctggagtactttccttctcaaatgctgagaacgggcaacaactttgagttcagctaccagtttgaggacgtgccttttcacagcagctacgcgcacagccaaagcctggaccggctgacgaaccccctcatcgaccagtacctgtactacctggcccggacccagagcactacggggtccacaagggggctgcagttccatcaggctgggcccaacaccatggccgagcaatcaaagaactggctgcccggaccctgttatcggcagcagagactgtcaaaaaacatagacagcaacaacaacagtaactttgcctggaccggggccactaaataccatctgaatggtagaaattcattaaccaacccgggcgtagccatggccaccaacaaggacgacgaggaccagttctttcccatcaacggagtgctggtttttggcaaaacgggggctgccaacaagacaacgctggaaaacgtgctaatgaccagcgaggaggagatcaaaaccaccaatcccgtggctacagaagaatacggtgtggtctccagcaacctgcaatcgtctacggccggaccccagacacagactgtcaacagccagggggctctgcccggcatggtctggcagaaccgggacgtgtacctgcagggtcccatctgggccaaaattcctcacacggacggcaactttcacccgtctcccctgatgggcggatttggactcaaacacccgcctcctcaaattctcatcaagtatacttccaactactacaaatctacaaatgtggactttgctgtcaatactgagggtacttattcagagcctcgccccattggcacccgttacctcacccgtaacctgtaattgcctgttaatcaataaaccggttaattcgtttcagttgaactttggtctctgcgaagggcgaattc

SEQ ID NO: 415 - protein, 733 aa, Adeno-associated virus
MAADGYLPDWLEDNLSEGIREWWDLKPGAPKPKANQQKQDDGRGLVLPGYKYLGPFNGLDKGEPVNAADAAALEHDKAYDQQLKAGDNPYLRYNHADAEFQERLQEDTSFGGNLGRAVFQAKKRVLEPLGLVEEGAKTAPGKKRPIESPDSSTGIGKKGQQPAKKKLNFGQTGDSESVPDPQPIGEPPAGPSGLGSGTMAAGGGAPMADNNEGADGVGSSSGNWHCDSTWLGDRVITTSTRTWALPTYNNHLYKQISNGTSGGSTNDNTYFGYSTPWGYFDFNRFHCHFSPRDWQRLINNNWGFRPKRLNFKLFNIQVKEVTQNEGTKTIANNLTSTIQVFTDSEYQLPYVLGSAHQGCLPPFPADVFMIPQYGYLTLNNGSQAVGRSSFYCLEYFPSQMLRTGNNFEFSYQFEDVPFHSSYAHSQSLDRLMNPLIDQYLYYLSRTQSTGGTAGTQQLLFSQAGPNNMSAQAKNWLPGPCYRQQRVSTTVSQNNNSNFAWTGATKYHLNGRDSLVNPGVAMATHKGDEERFFPSSGVLMFGKQGAGKDNVDYSSVMLTSEEEIKTTNPVATEQYGVVADNLQQQNAAPIVGAVNSQGALPGMVWQNRDVYLQGPIWAKIPHTDGNFHPSPLMGGFGLKHPPPQILIKNTPVPADPPTTFSQAKLASFITQYSTGQVSVEIEWELQKENSKRWNPEIQYTSNYYKSTNVDFAVNTEGTYSEPRPIGTRYLTRSL

SEQ ID NO: 416 - DNA, 3113 bp, Adeno-associated virus
gaattcgccctttctacggctgcgtcaactggaccaatgagaactttcccttcaacgattgcgtcgacaagatggtgatctggtgggaggagggcaagatgacggccaaggtcgtggagtccgccaaggccattctcggcggcagcaaggtgcgcgtggaccaaaagtgcaagtcgtccgcccagatcgatcccacccccgtgatcgtcacttccaacaccaacatgtgcgccgtgattgacgggaacagcaccaccttcgagcaccagcagccgttacaagaccggatgttcaaatttgaactcacccgccgtctggagcatgactttggcaaggtgacaaagcaggaagtcaaagagttcttccgctgggcgcaggatcacgtgaccgaggtggcgcatgagttctacgtcagaaagggtggagccaacaagagacccgcccccgatgacgcggataaaagcgagcccaagcgggcctgcccctcagtcgcggatccatcgacgtcagacgcggaaggagctccggtggactttgccgacaggtaccaaaacaaatgttctcgtcacgcgggcatgcttcagatgctgtttccctgcaagacatgcgagagaatgaatcagaatttcaacatttgcttcacgcacgggaccagagactgttcagaatgtttccccggcgtgtcagaatctcaaccggtcgtcagaaagaggacgtatcggaaactctgtgccattcatcatctgctggggcgggctcccgagattgcttgctcggcctgcgatctggtcaacgtggacctggatgactgtgtttctgagcaataaatgacttaaaccaggtatggctgccgatggttatcttccagattggctcgaggacaacctctctgagggcattcgcgagtggtgggacttgaaacctggagccccgaaacccaaagccaaccagcaaaagcaggacgacggccggggtctggtgcttcctggctacaagtacctcggacccttcaacggactcgacaagggggagcccgtcaacgcggcggacgcagcggccctcgagcacgacaaggcctacgaccagcagctcaaagcgggtgacaatccgtacctgcggtataaccacgccgacgccgagtttcaggagcgtcttcaagaagatacgtcttttgggggcaacctcgggcgagcagtcttccaggccaagaagcgggttctcgaacctctcggtctggttgaggaaggcgctaagacggctcctggaaagaagagacccatagaatcccccgactcctccacgggcatcggcaagaaaggccagcagcccgctaaaaagaagctcaactttgggcagactggcgactcagagtcagtgcccgaccctcaaccaatcggagaaccccccgcaggcccctctggtctgggatctggtacaatggctgcaggcggtggcgctccaatggcagacaataacgaaggcgccgacggagtgggtagttcctcaggaaattggcattgcgattccacatggctgggcgacagagtcatcaccaccagcacccgaacctgggccctccccacctacaacaaccacctctacaagcaaatctccaacgggacatcgggaggaagcaccaacgacaacacctacttcggctacagcaccccctgggggtattttgactttaacagattccactgccacttctcaccacgtgactggcagcgactcatcaacaacaactggggattccggcccaagagactcaacttcaagctcttcaacatccaggtcaaggaggtcacgcagaatgaaggcaccaagaccatcgccaataaccttaccagcacgattcaggtctttacggactcggaataccagctcccgtacgtcctcggctctgcgcaccagggctgcctgcctccgttcccggcggacgtcttcatgattcctcagtacgggtacctgactctgaacaacggcagtcaggccgtgggccgttcctccttctactgcctggagtactttccttctcaaatgctgagaacgggcaacaactttgagttcagctaccagtttgaggacgtgccttttcacagcagctatgcgcacagccaaagcctggaccggctgatgaaccccctcatcgaccagtacctgtactacctgtctcggactcagtccacgggaggtaccgcaggaactcagcagttgctattttctcaggccgggcctaataacatgtcggctcaggccaaaaactggctacccgggccctgctaccggcagcaacgcgtctccacgacagtgtcgcaaaataacaacagcaactttgcttggaccggtgccaccaagtatcatctgaatggcagagactctctggtaaatcccggtgtcgctatggcaacgcacaagggcgacgaagagcgattttttccatccagcggagtcttgatgtttgggaaacagggagctggaaaagacaacgtggactatagcagcgttatgctaaccagtgaggaagaaatcaaaaccaccaacccagtggccacagaacagtacggcgtggtggccgataacctgcaacagcaaaacgccgctcctattgtaggggccgtcaacagtcaaggagccttacctggcatggtctggcagaaccgggacgtgtacctgcagggtcctatctgggccaagattcctcacacggacggcaactttcatccttcgccgctgatgggaggctttggactgaaacacccgcctcctcagatcctgattaagaatacacctgttcccgcggatcctccaactaccttcagtcaagccaagctggcgtcgttcatcacgcagtacagcaccggacaggtcagcgtggaaattgaatgggagctgcagaaagagaacagcaagcgctggaacccagagattcagtatacttccaactactacaaatctacaaatgtggactttgctgtcaatactgagggtacttattcagagcctcgccccattggcacccgttacctcacccgtagcctgtaattgcctgttaatcaataaaccggttgattcgtttcagttgaactttggtctctgcgaagggcgaattc

SEQ ID NO: 417 - protein, 738 aa, Adeno-associated virus
MAADGYLPDWLEDNLSEGIREWWDLKPGAPKPKANQQKQDDGRGLVLPGYKYLGPFNGLDKGEPVNAADAAALEHDKAYDQQLKAGDNPYLRYNHADAEFQERLQEDTSFGGNLGRAVFQAKKRVLEPLGLVEEGAKTAPGKKRPVEPSPQRSPDSSTGIGKTGQQPAKKRLNFGQTGDSESVPDPQPIGEPPAGPSGLGSGTMAAGGGAPMADNNEGADGVGSSSGNWHCDSTWLGDRVITTSTRTWALPTYNNHLYKQISNGTSGGSTNDNTYFGYSTPWGYFDFNRFHCHFSPRDWQRLINNNWGFRPKRLNFKLFNIQVKEVTQNEGTKTIANNLTSTIQVFTDSEYQLPYVLGSAHQGCPPPFPADVFMIPQYGYLTLNNGSQAVGRSSFYCLEYFPSQMRRTGNNFEFSYQFEDVPFHSSYAHSQSLDRLMNPLIDQYLYYLSRTQSTGGTAGTQQLLFSQAGPNNMSAQAKNWLPGPCYRQQRVSTTLSQNNNSNFAWTGATKYHLNGRDSLVNPGVAMATHKDDEERFFPSSGVLMFGKQGAGKDNVDYSSVMLTSEEEIKTTNPVATEQYGVVADNLQQQNAAPIVGAVNSQGALPGMVWQNRDVYLQGPIWAKIPHTDGNFHPSPLMGGFGLKHPPPQILIKNTPVPADPPTTFSQAKLASFITQYSTGQVSVEIEWELQKENSKRWNPEIQYTSNYYKSTNVDFAVNTEGTYSEPRPIGTRYLTRNL

SEQ ID NO: 418 - DNA, 3128 bp, Adeno-associated virus
gaattcgccctttctacggctgcgtcaactggaccaatgagaactttcccttcaacgattgcgtcgacaagatggtgatctggtgggaggagggcaagatgacggccaaggtcgtggagtccgccaaggccattctcggcggcagcaaggtgcgcgtggaccaaaagtgcaagtcgtccgcccagatcgaccccacccccgtgatcgtcacctccaacaccaacatgtgcgccgtgattgacgggaacagcaccaccttcgagcaccagcagccgttgcaggaccggatgttcaaatttgaactcacccgccgtctggagcatgactttggcaaggtgacaaagcaggaagtcaaagagttcttccgctgggcgcaggatcacgtgaccgaggtggcgcatgagttctacgtcagaaagggtggagccaacaagagacccgcccccgatgacgcggataaaagcgagcccaagcgggcctgcccctcagtcgcggatccatcgacgtcagacgcggaaggagctccggtggactttgccgacaggtaccaaaacaaatgttctcgtcacgcgggcatgcttcagatgctgtttccctgcaagacatgcgagagaatgaatcagaatttcaacatttgcttcacgcgcgggaccagagactgttcagaatgtttcccgggcgtgtcagaatctcaaccggtcgtcagaaagaggacgtatcggaaactctgtgccattcatcatctgctggggcgggctcccgagattgcttgctcggcctgcgatctggtcaacgtggacctggatgactgtgtttctgagcaataaatgacttaaaccaggtatggctgccgatggttatcttccagattggctcgaggacaacctctctgagggcattcgcgagtggtgggacttgaaacctggagccccgaaacccaaagccaaccagcaaaagcaggacgacggccggggtctggtgcttcctggctacaagtacctcggacccttcaacggactcgacaagggggagcccgtcaacgcggcggacgcagcggccctcgagcacgacaaggcctacgaccagcagctcaaagcgggtgacaatccgtacctgcggtataaccacgccgacgccgagtttcaggagcgtctgcaagaagatacgtcttttgggggcaacctcgggcgagcagtcttccaggccaagaagcgggttctcgaacctctcggtctggttgaggaaggcgctaagacggctcctggaaagaagagaccggtagagccatcaccccagcgttctccagactcctctacgggcatcggcaagacaggccagcagcccgcgaaaaagagactcaactttgggcagactggcgactcagagtcagtgcccgaccctcaaccaatcggagaaccccccgcaggcccctctggtctgggatctggtacaatggctgcaggcggtggcgctccaatggcagacaataacgaaggcgccgacggagtgggtagttcctcaggaaattggcattgcgattccacatggctgggcgacagagtcatcaccaccagcacccgaacctgggccctccccacctacaacaaccacctctacaagcaaatctccaacgggacatcgggaggaagcaccaacgacaacacctacttcggctacagcaccccctgggggtattttgactttaacagattccactgccacttctcaccacgtgactggcagcgactcatcaacaacaactggggattccggcccaagagactcaacttcaagctcttcaacatccaggtcaaggaggtcacgcagaatgaaggcaccaagaccatcgccaataaccttaccagcacgattcaggtctttacggactcggaataccagctcccgtacgtcctcggctctgcgcaccagggctgcccgcctccgttcccggcggacgtcttcatgattcctcagtacgggtacctgactctgaacaacggcagtcaggccgtgggccgttcctccttctactgcctggagtactttccttctcaaatgcggagaacgggcaacaactttgagttcagctaccagtttgaggacgtgccttttcacagcagctacgcgcatagccaaagcctggaccggctgatgaaccccctcatcgaccagtacctgtactacctgtctcggactcagtccacgggaggtaccgcaggaactcagcagttgctattttctcaggccgggcctaataacatgtcggctcaggccaaaaactggctacccgggccctgctaccggcagcaacgcgtctccacgacactgtcgcaaaataacaacagcaactttgcttggaccggtgccaccaagtatcatctgaatggcagagactctctggtaaatcccggtgtcgctatggcaacgcacaaggacgacgaagagcgattttttccatccagcggagtcttgatgtttgggaaacagggagctggaaaagacaacgtggactatagcagcgttatgctaaccagtgaggaagaaatcaaaaccaccaacccagtggccacagaacagtacggcgtggtggccgataacctgcaacagcaaaacgccgctcctattgtaggggccgtcaacagtcaaggagccttacctggcatggtctggcagaaccgggacgtgtacctgcagggtcctatctgggccaagattcctcacacggacggcaactttcatccttcgccgctgatgggaggctttggactgaaacacccgcctcctcagatcctgattaagaatacacctgttcccgcggatcctccaactaccttcagtcaagccaagctggcgtcgttcatcacgcagtacagcaccggacaggtcagcgtggaaattgaatgggagctgcagaaagagaacagcaagcgctggaacccagagattcagtatacttccaactactacaaatctacaaatgtggactttgctgtcaatactgagggtacttattcagagcctcgccccattggcacccgttacctcacccgtaacctgtaattgcctgttaatcaataaaccggttaattcgtttcagttgaactttggtctctgcgaagggcgaattc

SEQ ID NO: 419 - protein, 738 aa, Adeno-associated virus; identical to SEQ ID NO: 407

SEQ ID NO: 420 - DNA, 1933 bp, Adeno-associated virus
  modified_base (1302)..(1302): n = a, c, t, or g
  misc_feature (1302)..(1302): n is a, c, g, or t
caaggcctacgaccagcagctcaaagcgggtgacaatccgtacctgcggtataaccacgccgacgccgagtttcaggagcgtcttcaagaagatacgtcttttgggggcaacctcgggcgagcagtcttccaggccaaaaagcgggttctcgaacctcttggtctggttgagacgccagctaagacggcacctggaaagaagcgaccggtagactcgccagactccacctcgggcatcggcaagaaaggccagcagcccgcgaaaaagagactcaactttgggcagactggcgactcagagtcagtccccgaccctcaaccaatcggagaaccaccagcaggcccctctggtctgggatctggtacaatggctgcaggcggtggcgcaccaatggctgacaataacgagggcgccgacggagtgggtaatgcctcaggaaattggcattgcgattccacatggctgggcgacagagtcatcaccaccagcacccgaacctgggccctgcccacctacaacaaccacctctacaagcaaatctccagtcagtcagcagggagcaccaacgataacgtctatttcggctacagcaccccctgggggtattttgacttcaacagattccattgccacttctcaccacgtgactggcagcgacttatcaacaacaactggggattccggcccaagaagctcaacttcaagctcttcaacatccaggtcaaggaggtcacgacgaatgacggtgtcacaaccatcgctaataaccttaccagcacggttcaggtcttttcggactcggaatatcaactgccgtacgtcctcggctccgcgcaccagggctgcctgcctccgttcccggcagacgtgttcatgattccgcagtacggatacctgactctgaacaatggcagccaatcggtaggccgttcctccttctactgcctggagtactttccttctcagatgctgagaacgggcaacaacttcacctttagctacaccttcgaggacgtgcctttccacagcagctacgcgcacagccagagtctggaccggctgatgaatcccctcatcgaccagtacctgtactacttggccagaacacagagcaacgcaggaggtactgctggcaatcgggaactgcagttttatcagggcggacctaccaccatggccgaacaagcaaagaactggctgcccggaccttgcttccggcaacagagagtatccaagacgctggatcaaaataacaacagcaactttgcctggactggtgccacaaaataccatttaaatgnaagaaattcattggttaatcccggtgtcgccatggcaacccacaaggacgacgaggaacgcttcttcccttcgagcggagttctaatttttggcaaaactggagcagctaataaaactacattagaaaacgtgctcatgacaaatgaagaagaaattcgtcctaccaacccggtagctaccgaggaatacgggattgtaagcagcaacttgcaggcggctagcaccgcagcccagacacaagttgttaacaaccagggagccttacctggcatggtctggcagaaccgggacgtgtacctgcaaggtcccatttgggccaagattcctcacacggacggcaactttcacccgtctcctctaatgggtggctttggactgaaacacccgcctccccagatcctgatcaaaaacacaccggtacctgctaatcctccagaagtgtttactcctgccaagtttgcttccttcatcacgcagtacagcaccgggcaagtcagcgttgagatcgagtgggagctgcagaaagagaacagcaagcgctggaacccagagattcagtacacctccaactttgacaaacagactggagtggactttgctgttgacagccagggtgtttactctgagcct

SEQ ID NO: 421 - protein, 733 aa, Adeno-associated virus
MAADGYLPDWLEDNLSEGIREWWDLKPGAPKPKANQQKQDDGRGLVLPGYKYLGPFNGLDKGEPVNAADAAALEHDKAYDQQLKAGDNPYLRYNHADAEFQERLQEDTSFGGNLGRAVFQAKKRVLEPLGLVEEGAKTAPGKKRPLESPQEPDSSSGIGKKGKQPAKKRLNFEEDTGAGDGPPEGSDTSAMSSDIEMRAAPGGNAVDAGQGSDGVGNASGDWHCDSTWSEGKVTTTSTRTWVLPTYNNHLYLRLGTTSNSNTYNGFSTPWGYFDFNRFHCHFSPRDWQRLINNNWGLRPKAMRVKIFNIQVKEVTTSNGETTVANNLTSTVQIFADSSYELPYVMDAGQEGSLSPFPNDVFMVPQYGYCGIVTGENQNQTDRNAFYCLEYFPSQMLRTGNNFEMAYNFGKVPFHSMYAYSQSPDRLMNPLLDQYLWHLQSTTSGETLNQGNAATTFGKIRSGDFAFYRKNWLPGPCVKQQRLSKTASQNYKIPASGGNALLKYDTHYTLNNRWSNIAPGPPMATAGPSDGDFSNAQLIFPGPSVTGNTTTSANNLLFTSEEEIAATNPRDTDMFGQIADNNQNATTAPITGNVTAMGVLPGMVWQNRDIYYQGPIWAKIPHADGHFHPSPLIGGFGLKHPPPQIFIKNTPVPANPATTFTAARVDSFITQYSTGQVAVQIEWEIEKERSKRWNPEVQFTSNYGNQSSMLWAPDTTGKYTEPRVIGSRYLTNHL

SEQ ID NO: 422 - DNA, 3105 bp, Adeno-associated virus
gaattcgcccttgctgcgtcaactggaccaatgagaactttcccttcaacgattgcgtcgacaagatggtgatctggtgggaggagggcaagatgaccgccaaggtcgtggagtccgccaaggccattctgggcggaagcaaggtgcgcgtggaccaaaagtgcaagtcatcggcccagatcgaccccacgcccgtgatcgtcacctccaacaccaacatgtgcgccgtgatcgacgggaacagcaccaccttcgagcaccagcagccgctgcaggaccgcatgttcaagttcgagctcacccgccgtctggagcacgactttggcaaggtgaccaagcaggaagtcaaagagttcttccgctgggctcaggatcacgtgactgaggtggcgcatgagttctacgtcagaaagggcggagccaccaaaagacccgcccccagtgacgcggatataagcgagcccaagcgggcctgcccctcagttgcggagccatcgacgtcagacgcggaagcaccggtggactttgcggacaggtaccaaaacaaatgttctcgtcacgcgggcatgcttcagatgctgtttccctgcaagacatgcgagagaatgaatcagaatttcaacgtctgcttcacgcacggggtcagagactgctcagagtgcttccccggcgcgtcagaatctcaacccgtcgtcagaaaaaagacgtatcagaaactgtgcgcgattcatcatctgctggggcgggcacccgagattgcgtgttcggcccgcgatctcgtcaacgtggacttggatgactgtgtttctgagcaataaatgacttaaaccaggtatggctgctgacggttatcttccagattggctcgaggacaacctctctgagggcattcgcgagtggtgggacctgaaacctggagcccccaagcccaaggccaaccagcagaagcaggacgacggccggggtctggtgcttcctggctacaagtacctcggacccttcaacggactcgacaagggggagcccgtcaacgcggcggacgcagcggccctcgagcacgacaaggcctacgaccagcagctcaaagcgggtgacaatccgtacctgcggtataaccacgccgacgccgagtttcaggagcgtctgcaagaagatacgtcttttgggggcaacctcgggcgagcagtcttccaggccaagaagagggtactcgaacctctgggcctggttgaagaaggtgctaagacggctcctggaaagaagagaccgttagagtcaccacaagagcccgactcctcctcaggaatcggcaaaaaaggcaaacaaccagccaaaaagagactcaactttgaagaggacactggagccggagacggaccccctgaaggatcagataccagcgccatgtcttcagacattgaaatgcgtgcagcaccgggcggaaatgctgtcgatgcgggacaaggttccgatggagtgggtaatgcctcgggtgattggcattgcgattccacctggtctgagggcaaggtcacaacaacctcgaccagaacctgggtcttgcccacctacaacaaccacttgtacctgcggctcggaacaacatcaaacagcaacacctacaacggattctccaccccctggggatactttgactttaacagattccactgtcacttctcaccacgtgactggcaaagactcatcaacaacaactggggactacgaccaaaagccatgcgcgttaaaatcttcaatatccaagttaaggaggtcacaacgtcgaacggcgagactacggtcgctaataaccttaccagcacggttcagatatttgcggactcgtcgtatgagctcccgtacgtgatggacgctggacaagagggaagtctgtctcctttccccaatgacgtcttcatggtgcctcaatatggctactgtggcattgtgactggcgaaaatcagaaccagacggacagaaatgctttctactgcctggagtattttccttcacaaatgctgagaactggcaataactttgaaatggcttacaactttgggaaggtgccgttccactcaatgtatgcttacagccagagcccggacagactgatgaatcccctcctggaccagtacctgtggcacttacagtcgaccacctctggagagactctgaatcaaggcaatgcagcaaccacatttggaaaaatcaggagtggagactttgccttttacagaaagaactggctgcctgggccttgtgttaaacagcagagactctcaaaaactgccagtcaaaattacaagattcctgccagcgggggcaacgctctgttaaagtatgacacccactataccttaaacaaccgctggagcaacatagcgcctggacctccaatggcaacagctggaccttcagatggggacttcagcaacgcccagctcatcttccctggaccatcagtcaccggaaacacaacaacctcagcaaacaatctgttgtttacatcagaagaagaaattgctgccaccaacccaagagacacggacatgtttggtcagattgctgacaataatcagaatgctacaactgctcccataaccggcaacgtgactgctatgggagtgcttcctggcatggtgtggcaaaacagagacatttactaccaagggccaatttgggccaagatcccacacgcggacggacattttcatccttcaccgctaattggcggttttggactgaaacatccgcctccccagatatttatcaaaaacacccccgtacctgccaatcctgcgacaaccttcactgcagccagagtggactctttcatcacacaatacagcaccggccaggtcgctgttcagattgaatgggaaatcgaaaaggaacgctccaaacgctggaatcctgaagtgcagtttacttcaaactatgggaaccagtcttctatgttgtgggctcccgatacaactgggaagtatacagagccgcgggttattggctctcgttatttgactaatcatttgtaactgcctagttaatcaataaaccgtgtgattcgtttcagttgaactttggtctctgcgaagggcgaattc

SEQ ID NO: 423 - protein, 733 aa, Adeno-associated virus
MAADGYLPDWLEDNLSEGIREWWDLKPGAPKPKANQQKQDDGRGLVLPGYKYLGPFNGLDKGEPVNAADAAALEHDKAYDQQLKAGDNPYLRYNHADAEFQERLQEDTSFGGNLGRAVFQAKKRVLEPLGLVEEGAKTAPGKKRPLESPQEPDSSSGIGKKGKQPAKKRLNFEEDTGAGDGPPEGSDTSAMSSDIEMRAAPGGNAVDAGQGSDGVGNASGDWHCDSTWSEGKVTTTSTRTWVLPTYNNHLYLRLGTTSNSNTYNGFSTPWGYFDFNRFHCHFSPRDWQRLINNNWGLRPKAMRVKIFNIQVKEVTTSNGETTVANNLTSTVQIFADSSYELPYVMDAGQEGSLPPFPNDVFMVPQYGYCGIVTGENQNQTDRNAFYCLEYFPSQMLRTGNNFEMAYNFEKVPFHSMYAHSQSLDRLMNPLLDQYLWHLQSTTSGETLNQGNAATTFGKIRSGDFAFYRKNWLPGPCVKQQRFSKTASQNYKIPASGGNALLKYDTHYTLNNRWSNIAPGPPMATAGPSDGDFSNAQLIFPGPSVTGNTTTSANNLLFTSEEEIAATNPRDTDMFGQIADNNQNATTAPITGNVTAMGVLPGMVWQNRDIYYQGPIWAKIPHADGHFHPSPLIGGFGLKHPPPQIFIKNTPVPANPATTFTAARVDSFITQYSTGQVAVQIEWEIEKERSKRWNPEVQFTSNYGNQSSMLWAPDTTGKYTEPRVIGSRYLTNHL

SEQ ID NO: 424 - DNA, 3105 bp, Adeno-associated virus
gaattcgcccttgctgcgtcaactggaccaatgagaactttcccttcaacgattgcgtcgacaagatggtgatctggtgggaggagggcaagatgaccgccaaggtcgtggagtccgccaaggccattctgggcggaagcaaggtgcgcgtggaccaaaagtgcaagtcatcggcccagatcgaccccacgcccgtgatcgtcacctccaacaccaacatgtgcgccgtgatcgacgggaacagcaccaccttcgagcaccagcagccgctgcaggaccgcatgttcaagttcgagctcacccgccgtctggagcacgactttggcaaggtgaccaagcaggaagtcaaagagttcttccgctgggctcaggatcacgtgactgaggtggcgcatgagttctacgtcagaaagggcggagccaccaaaagacccgcccccagtgacgcggatataagcgagcccaagcgggcctgcccctcagttgcggagccatcgacgtcagacgcggaagcaccggtggactttgcggacaggtaccaaaacaaatgttctcgtcacgcgggcatgcttcagatgctgtttccctgcaagacatgcgagagaatgaatcagaatttcaacgtctgcttcacgcacggggtcagagactgctcagagtgcttccccggcgcgtcagaatctcaacccgtcgtcagaaaaaagacgtatcagaaactgtgcgcgattcatcatctgctggggcgggcacccgagattgcgtgttcggcctgcgatctcgtcaacgtggacttggatgactgtgtttctgagcaataaatgacttaaaccaggtatggctgctgacggttatcttccagattggctcgaggacaacctctctgagggcattcgcgagtggtgggacctgaaacctggagcccccaagctcaaggccaaccagcagaagcaggacgacggccggggtctggtgcttcctggctacaagtacctcggacccttccacggactcgacaagggggagcccgtcaacgcggcggacgcagcggccctcgagcacgacaaggcctacgaccagcagctcaaagcgggtgacaatccgtacctgcggtataaccacgccgacgccgagtttcaggagcgtctgcaagaagatacgtcttttgggggcaacctcgggcgagcagtcttccaggccaagaagagggtactcgaaccactgggcctggttgaagaaggtgctaagacggctcctggaaagaagagaccgttagagtcaccacaagagcccgactcctcctcaggaatcggcaaaaaaggcaaacaaccagccaaaaagagactcaactttgaagaggacactggagccggagacggaccccctgaaggatcagataccagcgccatgtcttcagacattgaaatgcgtgcagcaccgggcggaaatgctgtcgatgcgggacaaggttccgatggagtgggtaatgcctcgggtgattggcattgcgattccacctggtctgagggcaaggtcacaacaacctcgaccagaacctgggtcttgcccacctacaacaaccacttgtacctgcggctcggaacaacatcaaacagcaacacctacaacggattctccaccccctggggatactttgactttaacagattccactgtcacttctcaccacgtgactggcaaagactcatcaacaacaactggggactacgaccaaaagccatgcgcgttaaaatcttcaatatccaagttaaggaggtcacaacgtcgaacggcgagactacggtcgctaataaccttaccagcacggttcagatatttgcggactcgtcgtatgagctcccgtacgtgatggacgctggacaagagggaagtctgcctcctttccccaatgacgtcttcatggtgcctcaatatggctactgtggcattgtgactggcgaaaatcagaaccagacggacagaaatgctttctactgcctggagtattttccttcacaaatgctgagaactggcaataactttgaaatggcttacaactttgagaaggtgccgttccactcaatgtatgctcacagccagagcctggacagactgatgaatcccctcctggaccagtacctgtggcacttacagtcgaccacctctggagagactctgaatcaaggcaatgcagcaaccacatttggaaaaatcaggagtggagactttgccttttacagaaagaactggctgcctgggccttgtgttaaacagcagagattctcaaaaactgccagtcaaaattacaagattcctgccagcgggggcaacgctctgttaaagtatgacacccactataccttaaacaaccgctggagcaacatagcgcctggacctccaatggcaacagctggaccttcagatggggacttcagcaacgcccagctcatcttccctggaccatcagtcaccggaaacacaacaacctcagcaaacaatctgttgtttacatcagaaggagaaattgctgccaccaacccaagagacacggacatgtttggtcagattgctgacaataatcagaatgctacaactgctcccataaccggcaacgtgactgctatgggagtgcttcctggcatggtgtggcaaaacagagacatttactaccaagggccaatttgggccaagatcccacacgcggacggacattttcatccttcaccgctaattggcggttttggactgaaacatccgcctccccagatatttatcaaaaacacccccgtacctgccaatcctgcgacaaccttcactgcagccagagtggactctttcatcacacaatacagcaccggccaggtcgctgttcagattgaatgggaaatcgaaaaggaacgctccaaacgccggaatcctgaagtgcagtttacttcaaactatgggaaccagtcttctatgttgtgggctcccgatacaactgggaagtatacagagccgcgggttattggctctcgttatttgactaatcatttgtaactgcctagttaatcaataaaccgtgtgattcgtttcagttgaactttggtctctgcgaagggcgaattc

SEQ ID NO: 425 - protein, 733 aa, Adeno-associated virus
MAADGYLPDWLEDNLSEGIREWWDLKPGAPKPKANQQKQDDGRGLVLPGYEYLGPFNGLDKGEPVNAADAAALEHDKAYDQQLKAGDNPYLRYNHADAEFQERLQEDTSFGGNLGRAVFQAKKRVLEPLGLVEEGAKTAPGKKRPLESPQEPDSSSGIGKKGKQPAKKRLNFEEDTGAGDGPPEGSDTSAMSSDIEMRAAPGGNAVDAGQGSDGVGNASGDWHCDSTWSEGKVTTTSTRTWVLPTYNNHLYLRLGTTSNSNTYNGFSTPWGYFDFNRFHCHFSPRDWQRLINNNWGLRPKAMRVKIFNIQVKEVTTSNGETTVANNLTSTVQIFADSSYELPYVMDAGQEGSLPPFPNDVFMVPQYGYCGIVTGENQNQTDRNAFYCLEYFPSQMLRTGNNFETAYNFEKVPFHSMYAHSQSLDGLMNPLLDQYLWHLQSTTSGETLNQGNAATTFGKIRSGDFAFYRKNWLPGPCVKQQRFSKTASQNYKIPASGGNALLKYDTHYTLNNRWSNIAPGPPMATAGPSDGDFSNAQLIFPGPSVTGNTTTSANNLLFTSEEEIAATNPRDTDMFGQIADNNQNATTAPITGNVTAMGVLPGMVWQNRDIYYQGPIWAKIPHADGHFHPSPLIGGFGLKHPPPQIFIKNTPVPAYPATTFTAARVDSFITQYSTGQVAVQIEWEIEKERSKRWNPEVQFTSNCGNQSSMLWAPDTTGKYTEPRVIGSRYLTNHL

SEQ ID NO: 426 - DNA, 3105 bp, Adeno-associated virus
gaattcgcccttcgcagagaccaaagttcaactgaaacgaatcacacggtttattgattaactaggcagttacaaatgattagtcaaataacgagagccaataacccgcggctctgtatacttcccagttgtatcgggagcccacaacatagaagactggttcccacagtttgaagtaaactgcacttcaggattccagcgtttggagcgttccttttcgatttcccattcaatctgaacagcgacctggccggtgctgtattgtgtgatgaaagagtccactctggctgcagtgaaggttgtcgcaggataggcaggtacgggggtgtttttgataaatatctggggaggcggatgtttcagtccaaaaccgccaattagcggtgaaggatgaaaatgtccgtccgcgtgtgggatcttggcccaaattggcccttggtagtaaatgtctctgttttgccacaccatgccaggaagcactcccatagcagtcacgttgccggttatgggagcagttgtagcattctgattattgtcagcaatctgaccaaacatgtccgtgtctcttgggttggtggcagcaatttcttcttctgatgtaaacaacagattgtttgctgaggttgttgtgtttccggtgactgatggtccagggaagatgagctgggcgttgctgaagtccccatctgaaggtccagctgttgccattggaggtccaggcgctatgttgctccagcggttgtttaaggtatagtgggtgtcatactttaacagagcgttgcccccgctggcaggaatcttgtaattttgactggcagtttttgagaatctctgctgtttaacacaaggcccaggcagccagttctttctgtaaaaggcaaagtctccactcctgatttttccaaatgtggttgctgcattgccttgattcagagtctctccagaggtggtcgactgtaagtgccacaggtactggtccaggaggggattcatcagtccgtccaggctctggctgtgagcatacattgagtggaacggcaccttctcaaagttgtaagccgtttcaaagttattgccagttctcagcatttgtgaaggaaaatactccaggcagtagaaagcatttctgtccgtctggttctgattttcgccagtcacaatgccacagtagccatattgaggcaccatgaagacgtcattggggaaaggaggcagacttccctcttgtccagcgtccatcacgtacgggagctcatacgacgagtccgcaaatatctgaaccgtgctggtaaggttattagcgaccgtagtctcgccgttcgacgttgtgacctccttaacttggatattgaagattttaacgcgcatggcttttggtcgtagtccccagttgttgttgatgagtctttgccagtcacgtggtgagaagtgacagtggaatctgttaaagtcaaagtatccccagggggtggagaatccgttgtaggtgttgctgtttgatgttgttccgagccgcaggtacaagtggttgttgtaggtgggcaagacccaggttctggtcgaggttgttgtgaccttgccctcagaccaggtggaatcgcaatgccaatcacccgaggcattacccactccatcggaaccttgtcccgcatcgacagcatttccgcccggtgctgcacgcatttcaatgtctgaagacatggcgctggtatctgatccttcagggggtccgtctccggctccagtgtcctcttcaaagttgagtctctttttggctggttgtttgccttttttgccgattcctgaggaggagtcgggctcttgtggtgactctaacggtctcttctttccaggagccgtcttagcaccttcttcaaccaggcccagaggttcgagtaccctcttcttggcctggaagactgctcgcccgaggttgcccccaaaagacgtatcttcttgcagacgctcctgaaactcggcgtcggcgtggttataccgcaggtacggattgtcacccgctttgagctgctggtcgtaggccttgtcgtgctcgagggccgctgcgtccgccgcgttgacgggctcccccttgtcgagtccgttgaagggtccgaggtactcgtagccaggaagcaccagaccccggccgtcgtcctgcttctgctggttggccttgggcttgggggctccaggtttcaggtcccaccactcgcgaatgccctcagagaggttgtcctcgagccaatctggaagataaccgtcagcagccatacctggtttaagtcatttattgctcagaaacacagtcatccaagtccacgttgacgagatcgcaggccgaacacgcaatctcgggtgcccgccccagcagatgatgaatcgcgcacagtttctgatacgtcttttttctgacgacgggttgagattctgacgcgccggggaagcactctgagcagtctctgaccccgtgcgtgaagcagacgttgaaattctgattcattctctcgcatgtcttgcagggaaacagcatctgaagcatgcccgcgtgacgagaacatttgttttggtacctgtccgcaaggtccaccggtgcttccgcgtctgacgtcgatggctccgcaactgaggggcaggcccgcttgggctcgcttatatccgcgtcactgggggcgggtcttttggtggctccgccctttctgacgtagaactcatgcgccacctcagtcacgtgatcctgagcccagcggaagaactctttgacttcctgcttggtcaccttgccaaagtcgtgctccagacggcgggtgagctcgaacttgaacatgcggtcctgcagcggctgctggtgctcgaaggtggtgctgttcccgtcgatcacggcgcacatgttggtgttggaggtgacgatcacgggcgtggggtcgatctgggccgatgacttgcacttttggtccacgcgcaccttgcttccgcccagaatggccttggcggactccacgaccttggcggtcatcttgccctcctcccaccagatcaccatcttgtcgacgcaatcgttgaagggaaagttctcattggtccagttgacgcagcaagggcgaattc

SEQ ID NO: 427 - protein, 729 aa, Adeno-associated virus
MAADGYLPDWLEDNLSEGIREWWDLKPGAPKPKANQQKQDDGRGLVLPGYKYLGPFNGLDKGEPVNAADAAALEHDKAYDQQLKAGDNPYLRYNHADAEFQERLQEDTSFGGNLGRAVFQAKKRVLEPLGLVEEGAKTAPGKKRPIDSPDSSTGIGKKGQQPAKKKLNFGQTGDSESVPDPQPLGEPPAAPSSVGSGTMAAGGGAPMADNNEGADGVGNASGNWHCDSTWLGDRVITTSTRTWALPTYNNHLYKQISSSSSGATNDNHYFGYSTPWGYFDFNRFHCHFSPRDWQRLINNNWGFRPKKLRFKLFNIQVKEVTTNDGVTTIANNLTSTVQVFSDSEYQLPYVLGSAHQGCLPPFPADVFMIPQYGYLTLNNGSQSVGRSSFYCLEYFPSQMLRTGNNFEFSYSFEDVPFHSSYAHSQSLDRLMNPLIDQYLYYLARTQSTTGSTRELQFHQAGPNTMAEQSKNWLPGPCYRQQGLSKNLDFNNNSNFAWTAATKYHLNGRNSLTNPGIPMATNKDDEDQFFPINGVLVFGKTGAANKTTLENVLMTSEEEIKTTNPVATEEYGVVSSNLQPSTAGPQSQTINSQGALPGMVWQNRDVYLQGPIWAKIPHTDGNFHPSPLMGGFGLKHPPPQILIKNTPVPANPPEVFTPAKFASFITQYSTGQVSVEIEWELQKENSKRWNPEIQYTSNYAKSNNVEFAVNPDGVYTEPRPIGTRYLPRNL

SEQ ID NO: 428 - DNA, 3094 bp, Adeno-associated virus
gaattcgcccttgctgcgtcaactggaccaagagaactttcccttcaacgattgcgtcgacaagatggtgatctggtgggaggagggcaagatgacggccaaggtcgtggagtccgccaaagccattctgggcggaagcaaggtgcgcgtcgaccaaaagtgcaagtcctcggcccagatcgatcccacccccgtgatcgtcacctccaacaccaacatgtgcgccgtgatcgacgggaacagcaccaccttcgagcaccagcagccgttgcaggaccggatgttcaaatttgaactcacccgccgtctggaacacgactttggcaaggtgaccaagcaggaagtcaaagagttcttccgctgggctagtgatcacgtgactgaggtgacgcatgagttctacgtcagaaagggcggagccagcaaaagacccgcccccgatgacgcggatataagcgagcccaagcgggcctgtccctcagtcacggacccatcgacgtcagacgcggaaggagctccggtggactttgccgacaggtaccaaaacaaatgttctcgtcacgcgggcatgcttcagatgctgtttccctgcaaaacgtgcgagagaatgaatcagaatttcaacatttgcttcacgcacggggtcagagactgtttagaatgtttccccggcgtgtcagaatctcaaccggtcgtcagaaaaaagacgtatcggaagctgtgtgcgattcatcatctgctggggcgggcacccgagattgcttgctcggcctgcgacctggtcaacgtggacctggacgactgtgtttctgagcaataaatgacttaaaccgggtatggctgccgatggttatcttccagattggctcgaggacaacctctctgagggcattcgcgagtggtgggacctgaaacctggagccccgaaacccaaagccaaccagcaaaagcaggacgacggccggggtctggtgcttcctggctacaagtacctcggacccttcaacggactcgacaagggggagcccgtcaacgcggcggacgcagcggccctcgagcacgacaaggcctacgaccagcagctcaaagcgggtgacaatccgtacctgcggtataaccacgccgacgccgagtttcaggagcgtctgcaagaagatacgtcatttgggggcaacctcgggcgagcagtcttccaggccaagaagcgggttctcgaacctctcggtctggttgaggaaggcgctaagacggctcctggaaagaagagacccatagactctccagactcctccacgggcatcggcaaaaaaggccagcagcccgctaaaaagaagctcaattttggtcagactggcgactcagagtcagtccccgaccctcaacctcttggagaacctccagcagcgccctctagtgtgggatctggtacaatggctgcaggcggtggcgcaccaatggcagacaataacgaaggtgccgacggagtgggtaatgcctcaggaaattggcattgcgattccacatggctgggcgacagagtcatcaccaccagcaccagaacctgggccctccccacctacaacaaccacctctacaagcaaatctccagcagcagctcaggagccaccaatgacaaccactacttcggctacagcaccccctgggggtattttgactttaacagattccactgccacttctcaccacgtgactggcagcgactcatcaacaacaactggggattccggcccaagaagctgcggttcaagctcttcaacatccaggtcaaggaggtcacaacgaatgacggcgtcacgaccatcgctaataaccttaccagcacggttcaggtcttctcggactcggaataccagctgccgtacgtcctcggctctgcgcaccagggctgcctgcctccgttcccggcggacgtcttcatgattcctcagtacggctacctgactctgaacaacggcagccaatcggtgggccgttcctccttctactgcctggaatatttcccctctcaaatgctgagaacgggcaacaactttgagttcagttacagcttcgaggacgtgcctttccacagcagctacgcgcacagccagagcctagaccggctgatgaaccctctcatcgaccagtacctgtactacctggcccggacccagagcaccacgggttccaccagggaactgcaatttcatcaagctgggcccaatactatggccgagcagtcaaagaactggctgcctggaccctgctataggcaacagggactgtcaaagaacttggactttaacaacaacagcaattttgcctggactgctgccactaaatatcatctgaatggcagaaactctttgaccaatcctggcattcccatggcaaccaacaaggatgatgaggaccagttctttcccatcaacggggtactggtttttggcaagacgggagctgccaacaaaactacgctggaaaacgttctgatgaccagcgaggaggagatcaagaccactaaccctgtggctacagaagaatacggtgtggtctccagcaacctgcagccgtctacagccgggcctcaatcacagactatcaacagccagggagcactgcctggcatggtctggcagaaccgggacgtgtatctgcagggtcccatctgggccaaaattcctcacacggatggcaactttcacccgtctcctctgatgggcggttttggactcaaacacccgcctccacagatcctgatcaaaaacacacctgtacctgctaatcctccggaggtgtttactcctgccaagtttgcctccttcatcacgcagtacagcaccggacaagtcagcgtggaaatcgagtgggagctgcagaaagaaaacagcaagcgctggaacccagaaattcagtatacttccaattatgccaagtctaataatgttgaatttgctgtgaaccctgatggtgtttatactgagcctcgccccattggcactcgttacctcccccgtaatctgtaattgcttgttaatcaataaaccggttgattcgtttcagttgaactttggtctctgcgaagggcgaattc

SEQ ID NO: 429 - protein, 1458 aa, Adeno-associated virus
MAADGYLPDWLEDNLSEGIREWWDLKPGAPKPKANQQKQDDGRGLVLPGYKYLGPFNGLDKGEPVNAADAAALEHDKAYDQQLKAGDNPYLRYNHADAEFQERLQEDTSFGGNLGRAVFQAKKRVLEPLGLVEEGAKTAPGKKRPIDSPDSSTGIGKKGQQPAKKKLNFGQTGDSESVPDPQPLGEPPAAPSSVGSGTMAAGGGAPTADNNEGADGVGNASGNWHCDSTWLGDRVITTSTRTWALPTYNNHLYKQISSSSSGATNDNHYFGYSTPWGYFDFNRFHCHFSPRDWQRLINNNWGFRPKKLRFKLFNIQVKEVTTNDGVTTIANNLTSTVQVFSDSEYQLPYVLGSAHQGCLPPFPADVFMIPQYGYLTLNNGSQSVGRSSFYCLEYFPSQMLRTGNNFEFSYSFEDVPFHSSYAHSQSLDRLMNPLIDQYLYYLARTQSTTGSTRELQFHQAGPNTMAEQSKNWLPGPCYRQQRLSKNLDFNNNSNFAWTAATKYHLNGRNSLTNPGIPMATNKDDEDQFFPINGVLVFGKTGAANKTTLENVLMTSEEEIKTTNPVATEEYGVVSSNLQSSTAGPQSQTINSQGALPGMVWQNRDVYLQGPIWAKIPHTDGNFHPSPLMGGFGLEHPPPQILIKNTPVPANPPEVFTPAKFASFITQYSTGQVSVEIEWELQKENSKRWNPEIQYTSNYAKSNNVEFAVNPDGVYTEPRPIGTRYLTRNLMAADGYLPDWLEDNLSEGIREWWDLKPGAPKPKANQQKQDDGRGLVLPGYKYLGPFNGLDKGEPVNAADAAALEHDKAYDQQLKAGDNPYLRYNHADAEFQERLQEDTSFGGNLGRAVFQAKKRVLEPLGLVEEGAKTAPGKKRPIGSPDSSTGIGKKGQQPAKKKLNFGQTGDSESVPDPQPLGEPPAAPSSVGSGTMAAGGGAPMADNNEGADGVGNASGNWHCDSTWLGDRVITTSTRTWALPTYNNHLYKQISSSSSGATNDNHYFGYSTPWGYFDFNRFHCHFSPRDWQRLINNNWGFRPKKLRFKLLNIQVKEVTTNDGVTTIANNLTSTVQVFSDSEYQLPYVLGSAHQGCLPPFPADVFMIPQYGYLTLDNGSQSVGRSSFYCLEYFPSQMLRTGNNFEFSYSFEDVPFHSSYAHSQSLDRLMNPLIDQYLYYLARTQSTTGSTRELQFHQAGPNTMAEQSKNWLPGPCYRQQRLSKNLDFNNNSNFAWTAATKYHLNGRNSLTNPGIPMATNKDDEDQFFPINGVLVFGKTGAANKTTLENVLMTSEEEIKTTNPVATEEYGVVSSNLQSSTAGPQSQTINSQGALPGMVWQNRDVYLQGPIWAKIPHTDGNFHPSPLMGGFGLKHPPPQILIKNTPVPANPPEVFTPAKFASFITQYSTGQVSVEIEWELQKENSKRWNPEIQYTSNYAKSNNVEFAVNPDGVYTEPRPIGTRYLTRNL

SEQ ID NO: 430 - DNA, 3095 bp, Adeno-associated virus
gaattcgcccttcgcagagaccaaagttcaactgaaacgaatcaaccggtttattgattaacaagcaattacagattacgggtgaggtaacgagtgccaatggggcgaggctcagtataaacaccatcagggttcacagcaaattcaacattattagacttggcataattggaagtatactgaatttctgggttccagcgcttgctgttttctttctgcagctcccactcgatttccacgctgacttgtccggtgctgtactgcgtgatgaaggaggcaaacttggcaggagtaaacacctccggaggattagcaggtacaggtgtgtttttgatcaggatctgtggaggcgggtgtttgagtccaaaaccgcccatcagaggagacgggtgaaagttgccatccgtgtgaggaattttggcccagatgggaccctgcagatacacgtcccggttctgccagaccatgccaggcagtgctccctggctgttgatagtctgtgattgaggcccggctgtagacgactgcaggttgctggagaccacaccgtattcttctgtagccacagggttagtggtcttgatctcctcctcgctggtcatcagaacgttttccagcgtagttttgttggcagctcccgtcttgccaaaaaccagtaccccgttgatgggaaagaactggtcctcatcatccttgttggttgccatgggaatgccaggattggtcaaagagtttctgccattcagatgatatttagtggcagcagtccaggcaaaattgctgttgttgttaaagtccaagttctttgacagtctctgttgcctatagcagggtccaggcagccagttctttgactgctcggccatagtattgggcccagcttgatgaaattgcagttccctggtggaacccgtggtgctctgggtccgggccaggtagtacaggtactggtcgatgagagggttcatcagccggtctaggctctggctgtgcgcgtagctgctgtggaaaggcacgtcctcgaagctgtaactgaactcaaagttgttgcccgttctcagcatttgagaggggaaatattccaggcagtagaaggaggaacggcccaccgattggctgccgttgtccagagtcaggtagccgtactgaggaatcatgaagacgtccgccgggaacggaggcaggcagccctggtgcgcagagccgaggacgtacggcagctggtattccgagtccgagaagacctgaaccgtgctggtaaggttattagcgatggtcgtgacgccgtcattcgttgtgacctccttgacctggatgttgaggagcttgaaccgcagcttcttgggccggaatccccagttgttgttgatgagtcgctgccagtcacgtggtgagaagtggcagtggaatctgttaaagtcaaaatacccccagggggtgctgtagccgaagtagtggttgtcattggtggctcctgagctgctgctggagatttgcttgtagaggtggttgttgtaggtggggagggcccaggttctggtgctggtggtgatgactctgtcgcccagccatgtggaatcgcaatgccaatttcctgaggcattacccactccgtcggcaccttcgttattgtctgccattggtgcgccaccgcctgcagccattgtaccagatcccacactagagggcgctgctggaggttctccaagaggttgagggtcggggactgactctgagtcgccagtctgaccaaaattgagcttctttttagcgggctgctggccttttttgccgatgcccgtggaggagtctggagagcctatgggtctcttctttccaggagccgtcttagcgccttcctcaaccagaccgagaggttcgagaacccgcttcttggcctggaagactgctcgcccgaggttgcccccaaatgacgtatcttcttgcagacgctcctgaaactcggcgtcggcgtggttataccgcaggtacggattgtcacccgctttgagctgctggtcgtaggccttgtcgtgctcgagggccgctgcgtccgccgcgttgacgggctcccccttgtcgagtccgttgaagggtccgaggtacttgtagccaggaagcaccagaccccggccgtcgtcctgcttttgctggttggctttgggtttcggggctccaggtttcaggtcccaccactcgcgaatgccctcagagaggttgtcctcgagccaatctggaagataaccatcggcagccatacctggtttaagtcatttattgctcagaaacacagtcgtccaggtccacgttgaccaggtcgcaggccgagcaagcaatctcgggtgcccgccccagcagatgatgaatcgcacacagcttccgatacgtcttttttctgacgaccggttgagattctgacacgccggggaaacattctaaacagtctctgaccccgtgcgtgaagcaaatgttgaaattctgattcattctctcgcacgttttgcagggaaacagcacctgaagcatgcccgcgtgacgagaacatttgttttggtacctgtcggcaaagtccaccggagctccttccgcgtctgacgtcgatgggtccgtgactgagggacgggcccgcttgggctcgcttatatccgcgtcatcgggggcgggtcttttgctggctccgccctttctgacgtagaactcatgcgtcacctcagtcacgtgatcactagcccagcggaagaactctttgacttcctgctttgtcaccttgccaaagtcgtgttccagacggcgggtgagttcaaatttgaacatccggtcctgcaacggttgctggtgctcgaaggtggtgctgttcccgtcgatcacggcgcacatgttggtgttggaggtgacgatcacgggggtgggatcgatctgggcggacgacttgcacttttggtccacgcgcaccttgctgccgccgagaatggccttggcggactccacgaccttggccgtcatcttgccctcctcccaccagatcaccatcttgtcgacgcaatcgttgaagggaaagttctcattggtccagttgacgcagcaagggcgaattc

SEQ ID NO: 431 - DNA, 3095 bp, Adeno-associated virus
gaattcgcccttcgcagagaccaaagttcaactgaaacgaatcaaccggtttattgattaacaagcaattacagattacgggtgaggtaacgagtgccaatggggcgaggctcagtataaacaccatcagggttcacagcaaattcaacattattagacttggcataattggaagtatactgaatttctgggttccagcgcttgctgttttctttctgcagctcccactcgatttccacgctgacttgtccggtgctgtactgcgtgatgaaggaggcaaacttggcaggagtaaacacctccggaggattagcaggtacaggtgtgtttttgatcaggatctgtggaggcgggtgttcgagtccaaaaccgcccatcagaggagacgggtgaaagttgccatccgtgtgaggaattttggcccagatgggaccctgcagatacacgtcccggttctgccagaccatgccaggcagtgctccctggctgttgatagtctgtgattgaggcccggctgtagacgactgcaggttgctggagaccacaccgtattcttctgtagccacagggttagtggtcttgatctcctcctcgctggtcatcagaacgttttccagcgtagttttgttggcagctcccgtcttgccaaaaaccagtaccccgttgatgggaaagaactggtcctcatcatccttgttggttgccatgggaatgccaggattggtcaaagagtttctgccattcagatgatatttagtggcagcagtccaggcaaaattgctgttgttgttaaagtccaagttctttgacagtctctgttgcctatagcagggtccaggcagccagttctttgactgctcggccatagtattgggcccagcttgatgaaattgcagttccctggtggaacccgtggtgctctgggtccgggccaggtagtacaggtactggtcgatgagagggttcatcagccggtctaggctctggctgtgcgcgtagctgctgtggaaaggcacgtcctcgaagctgtaactgaactcaaagttgttgcccgttctcagcatttgagaggggaaatattccaggcagtagaaggaggaacggcccaccgattggctgccgttgttcagagtcaggtagccgtactgaggaatcatgaagacgtccgccgggaacggaggcaggcagccctggtgcgcagagccgaggacgtacggcagctggtattccgagtccgagaagacctgaaccgtgctggtaaggttattagcgatggtcgtgacgccgtcattcgttgtgacctccttgacctggatgttgaagagcttgaaccgcagcttcttgggccggaatccccagttgttgttgatgagtcgctgccagtcacgtggtgagaagtggcagtggaatctgttaaagtcaaaatacccccagggggtgctgtagccgaagtagtggttgtcattggtggctcctgagctgctgctggagatttgcttgtagaggtggttgttgtaggtggggagggcccaggttctggtgctggtggtgatgactctgtcgcccagccatgtggaatcgcaatgccaatttcctgaggcattacccactccgtcggcaccttcgttattgtctgccgttggtgcgccaccgcctgcagccattgtaccagatcccacactagagggcgctgctggaggttctccaagaggttgagggtcggggactgactctgagtcgccagtctgaccaaaattgagcttctttttagcgggctgctggccttttttgccgatgcccgtggaggagtctggagagtctatgggtctcttctttccaggagccgtcttagcgccttcctcaaccagaccgagaggttcgagaacccgcttcttggcctggaagactgctcgcccgaggttgcccccaaatgacgtatcttcttgcaggcgctcctgaaactcggcgtcggcgtggttataccgcaggtacggattgtcacccgctttgagctgctggtcgtaggccttgtcgtgctcgagggccgctgcgtccgccgcgttgacgggctcccccttgtcgagtccgttgaagggtccgaggtacttgtagccaggaagcaccagaccccggccgtcgtcctgcttttgctggttggctttgggtttcggggctccaggtttcaggtcccaccactcgcgaatgccctcagagaggttgtcctcgagccaatctggaagataaccatcggcagccatacctggtttaagccatttattgctcagaaacacagtcgtccaggtccacgttgaccaggtcgcaggccgagcaggcaatctcgggtgcccgccccagcagatgatgaatcgcacacagcttccgatacgtcttttttctgacgaccggttgagattctgacacgccggggaaacattctaaacagtctctgaccccgtgcgtgaagcaaatgttgaaattctgattcattctctcgcacgttttgcagggaaacagcatctgaagcatgcccgcgtggcgagaacatttgttttggtacctgtcggcaaagtccaccggagctccttccgcgtctgacgtcgatgggtccgtgactgagggacaggcccgcttgggctcgcttatatccgcgtcatcgggggcgggtcttttgctggctccgccctttctgacgtagaactcatgcgtcacctcagtcacgtgatcactagcccagcggaagaactctttgacttcctgctttgtcaccttgccaaagtcgtgttccagacggcgggtgagttcaaatttgaacatccggtcctgcaacggctgctggtgctcgaaggtggtgctgttcccgtcgatcacggcgcgcatgttggtgttggaggtgacgatcacgggggtgggatcgatctgggcggacgacttgcacttttggtccacgcgcaccttgctgccgccgagaatggccttggcggactccacgaccttggccgtcatcttgccctcctcccaccagatcaccatcttgtcgacgcaatcgttgaagggaaagttctcattggtccagttgacgcagcaagggcgaattc

SEQ ID NO: 432 - protein, 729 aa, Adeno-associated virus; identical to SEQ ID NO: 160

SEQ ID NO: 433 - protein, 729 aa, Adeno-associated virus
MAADGYLPDWLEDNLSEGIREWWDLKPGAPKPKANQQKQDDGRGLVLPGYKYLGPFNGLDKGEPVNAADAAALEHDKAYDQQLKAGDNPYLRYNHADAEFQERLQEDTSFGGNLGRAVFQAKKRVLEPLGLVEEGAKTAPGKKRPIDSPDSSTGIGKKGQQPAKKKLNFGQTGDSESVPDPQPLGEPPAAPSSVGSGTMAAGGGAPTADNNEGADGVGNASGNWHCDSTWLGDRVITTSTRTWALPTYNNHLYKQISSSSSGATNDNHYFGYSTPWGYFDFNRFHCHFSPRDWQRLINNNWGFRPKKLRFKLFNIQVKEVTTNDGVTTIANNLTSTVQVFSDSEYQLPYVLGSAHQGCLPPFPADVFMIPQYGYLTLNNGSQSVGRSSFYCLEYFPSQMLRTGNNFEFSYSFEDVPFHSSYAHSQSLDRLMNPLIDQYLYYLARTQSTTGSTRELQFHQAGPNTMAEQSKNWLPGPCYRQQRLSKNLDFNNNSNFAWTAATKYHLNGRNSLTNPGIPMATNKDDEDQFFPINGVLVFGKTGAANKTTLENVLMTSEEEIKTTNPVATEEYGVVSSNLQSSTAGPQSQTINSQGALPGMVWQNRDVYLQGPIWAKIPHTDGNFHPSPLMGGFGLKHPPPQILIKNTPVPANPPEVFTPAKFASFITQYSTGQVSVEIEWELQKENSKRWNPEIQYTSNYAKSNNVEFAVNPDGVYTEPRPIGTRYLTRNL

SEQ ID NO: 434 - protein, 729 aa, Adeno-associated virus
MAADGYLPDWLEDNLSEGIREWWDLKPGAPKPKANQQKQDDGRGLVLPGYKYLGPFNGLDKGEPVNAADAAALEHDKAYDQQLKAGDNPYLRYNHADAEFQERLQEDTSFGGNLGRAVFQAKKRVLEPLGLVEEGAKTAPGKKRPIDSPDSSTGIGKKGQQPAKKKLNFGQTGDSESVPDPQPLGEPPAAPSSVGSGTMAAGGGAPMADNNEGADGVGNASGNWHCDSTWLGDRVITTSTRTWALPTYNNHLYKQISSSSSGATNDNHYFGYSTPWGYFDFNRFHCHFSPRDWQRLINNNWGFRPKKLRFKLFNIQVKEVTTNDGVTTIANNLTSTVQVFSDSEYQLPYVLGSAHQGCLPPFPADVFMIPQYGYLTLNNGSQSVGRSSFYCLEYFPSQMLRTGNNFEFSYSFEDVPFHSSYAHSQSLDRLMNPLIDQYLYYLARTQSTTGSTRELQFHQAGPNTMAEQSKNWLPGPCYRQQRLSKNLDFNNNSNFAWTAATKYHLNGRNSLTNPGIPMATNKDDEDQFFPINGVLVFGKTGAANKTTLENVLMTSEEEIKTTNPVATEEYGVVSSNLQSSTAGPQSQTINSQGALPGMVWQNRDVYLQGPIWAKIPHTDGNFHPSPLMGGFGLKHPPPQILIKNTPVPANPPEVFTPAKFASFITQYSTGQVSVEIEWELQKENSKRWNPEIQYTSNYAKSNNVEFAVNPDGVYTEPRPIGTRYLTRNL

SEQ ID NO: 435 - DNA, 2217 bp, Adeno-associated virus
atggctgctgacggttatcttccagattggctcgaggacaacctctctgagggcattcgcgagtggtgggacctgaaacctggagcccccaagcccaaggccaaccagcagaagcaggacgacggccggggtctggtgcttcctggctacaagtacctcggacccttcaacggactcgacaagggggagcccgtcaacgcggcggacgcagcggccctcgagcacgacaaggcctacgaccagcagctcaaagcgggtgacaatccgtacctgcggtataaccacgccgacgccgagtttcaggagcgtctacaagaagatacgtcttttgggggcaacctcgggcgagcagtcttccaggccaagaagcgggttctcgaacctctcggtctggttgaggaagctgctaagacggctcctggaaagaagagaccggtagaaccgtcacctcagcgttcccccgactcctccacgggcatcggcaagaaaggccagcggcccgctaaaaagagactgaactttggtcagactggcgactcagagtcagtccccgaccctcaaccaatcggagaaccaccagcaggcccctctggtctgggatctggtacaatggctgcaggcggtggcgctccaatggcagacaataacgaaggcgccgacggagtgggtagttcctcaggaaattggcattgcgattccacatggctgggcgacagagtcatcaccaccagcacccgaacctgggccctgcccacctacaacaaccacctctacaagcaaatatccaatgggacatcgggaggaagcaccaacgacaacacctacttcggctacagcaccccctgggggtattttgacttcaacagattccactgccacttctcaccacgtgactggcagcgactcatcaacaacaactggggattccggccaaaaagactcagcttcaagcccttcaacatccaggtcaaggaggtcacgcagaatgaaggcaccaagaccatcgccaataaccttaccagcacgattcaggtatttacggactcggaataccagctgccgtacgtcctcggctccgcgcaccagggctgcctgcctccgttcccggcggacgtcttcatgattccccagtacggctaccttacactgaacaatggaagtcaagccgtaggccgttcctccttctactgcctggaatattttccatctcaaatgctgcgaactggaaacaattttgaattcagctacaccttcgaggacgtgcctttccacagcagctacgcacacagccagagcttggaccgactgatgaatcctctcatcgaccagtacctgcactacttatccagaactcagtccacaggaggaactcaaggtacccagcaattgttattttctcaagctgggcctgcaaacatgtcggctcaggctaagaactggctacctggaccttgctaccggcagcagcgagtctctacgacactgtcgcaaaacaacaacagcaactttgcttggactggtgccaccaaatatcacctgaacggaagagactctttggtaaatcccggtgtcgccatggcaacccacaaggacgacgaggaacgcttcttcccgtcgagtggagtcctgatgtttggaaaacagggtgctggaagagacaatgtggactacagcagcgttatgctaaccagcgaagaagaaattaaaaccactaaccctgtagccacagaacaatacggtgtggtggctgacaacttgcagcaaaccaatacagggcctattgtgggaaatgtcaacagccaaggagccttacctggcatggtctggcagaaccgagacgtgtacctgcagggtcccatctgggccaagattcctcacacggacggcaacttccacccttcaccgctaatgggaggatttggactgaagcacccacctcctcagatcctgatcaagaacacgccggtacctgcggatcctccaacaacgttcagccaggcgaaattggcttccttcattacgcagtacagcaccggacaggtcagcgtggaaatcgagtgggagctgcagaaggagaacagcaaacgctggaacccagagattcagtacacttcaaactactacaaatctacaaatgtggactttgctgtcaatacagagggaacttattctgagcctcgccccattggtactcgctacctcacccgtaatctgtaa

SEQ ID NO: 436 - protein, 738 aa, Adeno-associated virus
MAADGYLPDWLEDNLSEGIREWWDLKPGAPKPKANQQKQDDGRGLVLPGYKYLGPFNGLDKGEPVNAADAAALEHDKAYDQQLKAGDNPYLRYNHADAEFQERLQEDTSFGGNLGRAVFQAKKRVLEPLGLVEEAAKTAPGKKRPVEPSPQRSPDSSTGIGKKGQRPAKKRLNFGQTGDSESVPDPQPIGEPPAGPSGLGSGTMAAGGGAPMADNNEGADGVGSSSGNWHCDSTWLGDRVITTSTRTWALPTYNNHLYKQISNGTSGGSTNDNTYFGYSTPWGYFDFNRFHCHFSPRDWQRLINNNWGFRPKRLSFKPFNIQVKEVTQNEGTKTIANNLTSTIQVFTDSEYQLPYVLGSAHQGCLPPFPADVFMIPQYGYLTLNNGSQAVGRSSFYCLEYFPSQMLRTGNNFEFSYTFEDVPFHSSYAHSQSLDRLMNPLIDQYLHYLSRTQSTGGTQGTQQLLFSQAGPANMSAQAKNWLPGPCYRQQRVSTTLSQNNNSNFAWTGATKYHLNGRDSLVNPGVAMATHKDDEERFFPSSGVLMFGKQGAGRDNVDYSSVMLTSEEEIKTTNPVATEQYGVVADNLQQTNTGPIVGNVNSQGALPGMVWQNRDVYLQGPIWAKIPHTDGNFHPSPLMGGFGLKHPPPQILIKNTPVPADPPTTFSQAKLASFITQYSTGQVSVEIEWELQKENSKRWNPEIQYTSNYYKSTNVDFAVNTEGTYSEPRPIGTRYLTRNL

SEQ ID NO: 437 - DNA, 2217 bp, Adeno-associated virus
atggctgctgacggttatcttccagattggctcgaggacaacctctctgagggcattcgcgagtggtgggacctgaaacctggagcccccaagcccaaggccaaccagcagaagcaggacgacggccggggtctggtgcttcctggctacaagtacctcggacccttcaacggactcgacaagggggagcccgtcaacgcggcggacgcagcggccctcgagcacgacaaggcctacgaccagcagctcaaagcgggtgacaatccgtacctgcggtataaccacgccgacgccgagtttcaggagcgtctgcaagaagatacgtcttttgggggcaacctcgggcgagcagtcttccaggccaagaagcgggttctcgaacctctcggtctggttgaggaagctgctaagacggctcctggaaagaagagaccggtagaaccgtcacctcagcgttcccccgactcctccacgggcatcggcaagaaaggccagcagcccgctaaaaagagactgaactttggtcagactggcgactcagagtcagtccccgaccctcaaccaatcggagaaccaccagcaggcccctctggtctgggatctggtacaatggctgcaggcggtggcgctccaatggcagacaataacgaaggcgccgacggagtgggtagttcctcaggaaattggcattgcgattccacatggctgggcgacagagtcatcaccaccagcacccgaacctgggccctgcccacctacaacaaccacctctacaagcaaatatccaatgggacatcgggaggaagcaccaacgacaacacctacttcggctacagcaccccctgggggtattttgacttcaacagattccactgccacttctcaccacgtgactggcagcgactcatcaacaacaactggggattccggccaaaaagactcagcttcaagctcttcaacatccaggtcaaggaggtcacgcagaatgaaggcaccaagaccatcgccaataaccttaccagcacgattcaggtatttacggactcggaataccagctgccgtacgtcctcggctccgcgcaccagggctgcctgcctccgttcccggcggacgtcttcatgattccccagtacggctaccttacactgaacaatggaagtcaagccgtaggccgttcctccttctactgcctggaatattttccatctcaaatgctgcgaactggaaacaattttgaattcagctacaccttcgaggacgtgcctttccacagcagctacgcacacagccagagcttggaccgactgatgaatcctctcatcgaccagtacctgtactacttatccagaactcagtccacaggaggaactcaaggtacccagcaattgttattttctcaagctgggcctgcaaacatgtcggctcaggctaagaactggctacctggaccttgctaccggcagcagcgagtctctacgacactgtcgcaaaacaacaacagcaactttgcttggactggtgccaccaaatatcacctgaacggaagagactctttggtaaatcccggtgtcgccatggcaacccacaaggacgacgaggaacgcttcttcccgtcgagtggagtcctgatgtttggaaaacagggtgctggaagagacaatgtggactacagcagcgttatgctaaccagcgaagaagaaattaaaaccactaaccctgtagccacagaacaatacggtgtggtggctgataacttgcagcaaaccaatacggggcctattgtgggaaatgtcaacagccaaggagccttacctggcatggtctggcagaaccgagacgtgtacctgcagggtcccatctgggccaagattcctcacacggacggcaacttccacccttcaccgctaatgggaggatttggactgaagcacccacctcctcagatcctgatcaagaacacgccggtacctgcggatcctccaacaacgttcagccaggcgaaattggcttccttcattacgcagtacagcaccggacaggtcagcgtggaaatcgagtgggagctgcagaaggagaacagcaaacgctggaacccagagattcagtacacttcaaactactacaaatctacaaatgtggactttgctgtcaatacagagggaacttattctgagcctcgccccattggtactcgttacctcacccgtaatctgtaa

SEQ ID NO: 438 - protein, 738 aa, Adeno-associated virus; identical to SEQ ID NO: 90

SEQ ID NO: 439 - protein, 738 aa, Adeno-associated virus
MAADGYLPDWLEDNLSEGIREWWDLKPGAPKPKANQQKQDDGRGLVLPGYKYLGPFNGLDKGEPVNAADAAALEHDKAYDQQLKAGDNPYLRYNHADAEFQERLQEDTSFGGNLGRAVFQAKKRVLEPLGLVEEAAKTAPGKKRPVEPSPQRSPDSSTGIGKKGQQPAKKRLNFGQTGDSESVPDPQPIGEPPAGPSGLGSGTMAAGGGAPMADNNEGADGVGSSSGNWHCDSTWLGDRVITTSTRTWALPTYNNHLYKQISNGTSGGSTNDNTYFGYSTPWGYFDFNRFHCHFSPRDWQRLINNNWGFRPKRLSFKLFNIQVKEVTQDEGTKTIANNLTSTIQVFTDSEYQLPYVLGSAHQGCLPPFPADVFMIPQYGYLTLNNGSQAVGRSSFYCLEYFPSQMLRTGNNFEFSYTFEDVPFHSSYAHSQSLDRLMNPLIDQYLYYLSRTQSTGGTQGTQQLLFSQAGPANMSARAKNWLPGPCYRQQRVSTTLSQNNNSNFAWTGATKYHLNGRDSLVNPGVAMATHKDDEERFFPSSGVLMFGKQGAGRDNVDYSSVMLTSEEEIKTTNPVATEQYGVVADNLQQANTGPIVGNVNSQGALPGMVWQNRDVYLQGPIWAKIPHTDGNFHPSPLMGGFGLKHPPPQILIKNTPVPADPPTTFSQAKLASFITQYSTGQVSVEIEWELQKENSKRWNPEIQYTSNYYKSTNVDFAVNSEGTYSEPRPIGTRYLTRNL

SEQ ID NO: 440 - DNA, 2217 bp, Adeno-associated virus
atggctgctgacggttatcttccagattggctcgaggacaacctctctgagggcattcgcgagtggtgggacctgaaacctggagcccccaagcccaaggccaaccagcagaagcaggacgacggccggggtctggtgcttcctggctacaagtacctcggacccttcaacggactcgacaagggggagcccgtcaacgcggcggacgcagcggccctcgagcacgacaaggcctacgaccagcagctcaaagcgggtgacaatccgtacctgcggtataaccacgccgacgccgagtttcaggagcgtctgcaagaagatacgtcttttgggggcaacctcgggcgagcagtcttccaggccaagaagcgggttctcgaacctctcggtctggttgaggaagctgctaagacggctcctggaaagaagagaccggtagaaccgtcacctcagcgttcccccgactcctccacgggcatcggcaagaaaggccagcagcccgctaaaaagagactgaactttggtcagactggcgactcagagtcagtccccgaccctcaaccaatcggagaaccaccagcaggcccctctggtctgggatctggtacaatggctgcaggcggtggcgctccaatggcagacaataacgaaggcgccgacggagtgggtagttcctcaggaaattggcattgcgattccacatggctgggcgacagagtcatcaccaccagcacccgaacctgggccctgcccacctacaacaaccacctctacaagcaaatatccaatgggacatcgggaggaagcaccaacgacaacacctacttcggctacagcaccccctgggggtattttgacttcaacagattccactgccacttctcaccacgtgactggcagcgactcatcaacaacaactggggattccggccaaaaagactcagcttcaagctcttcaacatccaggtcaaggaggtcacgcaggatgaaggcaccaagaccatcgccaataaccttaccagcacgattcaggtatttacggactcggaataccagctgccgtacgtcctcggctccgcgcaccagggctgcctgcctccgttcccggcggacgtcttcatgattccccagtacggctaccttacactgaacaatggaagtcaagccgtaggccgttcctccttctactgcctggaatattttccatctcaaatgctgcgaactggaaacaattttgaattcagctacaccttcgaggacgtgcctttccacagcagctacgcacacagccagagcttggaccgactgatgaatcctctcatcgaccagtacctgtactacttatccagaactcagtccacaggaggaactcaaggtacccagcaattgttattttctcaagctgggcctgcaaacatgtcggctcgggctaagaactggctacctggaccttgctaccggcagcagcgagtctctacgacactgtcgcaaaacaacaacagcaactttgcttggactggtgccaccaaatatcacctgaacggaagagactctttggtaaatcccggtgttgctatggcaacgcataaggacgacgaggaacgtttctttccatcgagcggagtcctgatgtttggaaaacagggtgctggaagagacaatgtggactatagcagcgttatgctaaccagcgaggaagaaattaaaaccactaaccctgtagccacagaacaatacggtgtggtggctgacaacttgcagcaagccaatacagggcctattgtgggaaatgtcaacagccaaggagccttacctggcatggtctggcagaaccgagacgtgtacctgcagggtcccatctgggccaaaattcctcacacggacggcaattttcacccgtctcctctgatgggcggctttggactgaagcacccacctccccagatcctgatcaagaatacgccggtacctgcggatcctccaacgacgttcagccaggcaaaattggcttccttcatcacgcagtacagcaccggccaggtcagcgtggagatcgagtgggagctgcagaaggagaacagcaagcgatggaacccagaaattcagtacacttccaactactacaaatctacaaatgtggactttgctgtcaattctgagggtacatattcagagcctcgccccattggtactcgttatctgacacgtaatctgtaa

SEQ ID NO: 441 - DNA, 2211 bp, Adeno-associated virus
atggctgccgatggttatcttccagattggctcgaggacaacctctctgagggcattcgcgagtggtgggacttgaaacctggagccccgaaacccaaagccaaccagcaaaagcaggacgacggccggggcctggtgcttcctggctacaagtacctcggacccttcaacggactcgacaagggggagcccgtcaacgcggcggacgcagcggccctcgagcacgacaaggcctacgaccagcagctcgaagcgggtgacaatccgtacctgcggtataaccacgccgacgccgagtttcaggagcgtctgcaagaagatacgtcttttgggggcaacctcgggcgagcagtcttccaggccaagaagcgggttctcgaacctctcggtctggttgaggaaggcgctaagacggctcctggaaagaagagaccagtagagcagtcaccccaagaaccagactcctcctcgggcatcggcaagaaaggccaacagcccgccagaaaaagactcaattttggccagactggcgactcagagtcagttccagaccctcaacctctcggagaacctccagcagcgccctctggtgtgggacctaatacaatggctgcaggcggtggcgcaccaatggcagacaataacgaaggcgccgacggagtgggtagttcctcgggaaattggcattgcgattccacatggctgggcgacagagtcatcaccaccagcacccgaacctgggccctgcccacctacaacaaccacctctacaagcaaatctccaacgggacatcgggaggagccaccaacgacaacacctacttcggctacagcaccccctgggggtattttgactttaacagattccactgccacttttcaccacgtgactggcagcgactcatcaacaacaactggggattccggcccaagagactcagcttcaagctcttcaacatccaggtcaaggaggtcacgcagaatgaaggcaccaagaccatcgccaataacctcaccagcaccatccaggtgtttacggactcggagtaccagctgccgtacgttctcggctctgcccaccagggctgcctgcctccgttcccggcggacgtgttcatgattccccagtacggctacctaacactcaacaacggtagtcaggccgtgggacgctcctccttctactgcctggaatactttccttcgcagatgctgagaaccggcaacaacttccagtttacttacaccttcgaggacgtgcctttccacagcagctacgcccacagccagagcttggaccggctgatgaatcctctgattgaccagtacctgtactacttgtctcggactcaaacaacaggaggcacggcaaatacgcagactctgggcttcagccaaggtgggcctaatacaatggccaatcaggcaaagaactggctgccaggaccctgttaccgccaacaacgcgtctcaacgacaaccgggcaaaacaacaatagcaactttgcctggactgctgggaccaaataccatctgaatggaagaaattcattggctaatcctggcatcgctatggcaacacacaaagacgacgaggagcgttttttcccagtaacgggatcctgtttttggcaacaaaatgctgccagagacaatgcggattacagcgatgtcatgctcaccagcgaggaagaaatcaaaaccactaaccctgtggctacagaggaatacggtatcgtggcagataacttgcagcagcaaaacacggctcctcaaattggaactgtcaacagccagggggccttacccggtatggtctggcagaaccgggacgtgtacctgcagggtcccatctgggccaagattcctcacacggacggcaacttccacccgtctccgctgatgggcggctttggcctgaaacatcctccgcctcagatcctgatcaagaacacgcctgtacctgcggatcctccgaccaccttcaaccagtcaaagctgaactctttcatcacgcaatacagcaccggacaggtcagcgtggaaattgaatgggagctacagaaggaaaacagcaagcgctggaaccccgagatccagtacacctccaactactacaaatctacaagtgtggactttgctgttaatacagaaggcgtgtactctgaaccccgccccattggcacccgttacctcacccgtaatctgtaa

SEQ ID NO: 442 - protein, 736 aa, Adeno-associated virus
MAADGYLPDWLEDNLSEGIREWWDLKPGAPKPKANQQKQDDGRGLVLPGYKYLGPFNGLDKGEPVNAADAAALEHDKAYDQQLEAGDNPYLRYNHADAEFQERLQEDTSFGGNLGRAVFQAKKRVLEPLGLVEEGAKTAPGKKRPVEQSPQEPDSSSGIGKKGQQPARKRLNFGQTGDSESVPDPQPLGEPPAAPSGVGPNTMAAGGGAPMADNNEGADGVGSSSGNWHCDSTWLGDRVITTSTRTWALPTYNNHLYKQISNGTSGGATNDNTYFGYSTPWGYFDFNRFHCHFSPRDWQRLINNNWGFRPKRLSFKLFNIQVKEVTQNEGTKTIANNLTSTIQVFTDSEYQLPYVLGSAHQGCLPPFPADVFMIPQYGYLTLNNGSQAVGRSSFYCLEYFPSQMLRTGNNFQFTYTFEDVPFHSSYAHSQSLDRLMNPLIDQYLYYLSRTQTTGGTANTQTLGFSQGGPNTMANQAKNWLPGPCYRQQRVSTTTGQNNNSNFAWTAGTKYHLNGRNSLANPGIAMATHKDDEERFFPVTGSCFWQQNAARDNADYSDVMLTSEEEIKTTNPVATEEYGIVADNLQQQNTAPQIGTVNSQGALPGMVWQNRDVYLQGPIWAKIPHTDGNFHPSPLMGGFGLKHPPPQILIKNTPVPADPPTTFNQSKLNSFITQYSTGQVSVEIEWELQKENSKRWNPEIQYTSNYYKSTSVDFAVNTEGVYSEPRPIGTRYLTRNL

SEQ ID NO: 443 - DNA, 2214 bp, Adeno-associated virus
atggctgctgacggttatcttccagattggctcgaggacaacctctctgagggcattcgcgagtggtgggacctgaaacctggagcccccaagcccaaggccaaccagcagaagcaggacgacggccggggtctggtgcttcctggctacaagtacctcggacccttcaacggactcgacaagggggagcccgtcagcgcggcggacgcagcggccctcgagcacgacaaggcctgcgaccagcggctcaaagcgggtgacaatccgtacctgcggtataaccacgccgacgccgagtttcaggagcgtctgcaagaagatacgtcttttgggggcaacctcgggcgagcagtcttccaggccaagaagcgggttctcgaacctctcggtctggttgaggaagctgctaagacggctcctggaaagaagggaccggtagaaccgtcacctcagcgttcccccgactcctccacgggcatcggcaagaaaggccagcagcccgctagaaagagactgaactttgggcagactggcgactcagagtcagtccccgaccctcaaccaatcggagaaccaccagcaggcccctctggtctgggatctggtacaatggctgcaggcggtggcgcaccaatggctgacaataacgagggcgccgacggagtgggtaatgcctcaggaaattggcattgcgattccacatggctgggcgacagagtcatcaccaccagcacccgaacctgggctttgcccacctacaacaatcacctctacaagcaaatctccagtcagtcagcaggtagcaccaacgacaacgtctacttcggctacagcaccccctgggggtattttgacttcaacagattccactgtcacttctcaccacgtgactggcagcggctcatcaacaacaactggggattccggcccaagaagctcaacttcaagctgttcaacatccaggtcaaggaggtcacaacgaatgacggcgtcacgaccatcgccaataaccttaccagcacggttcaggtcttttcggactcggaataccagctgccctacgtcctcggctccgcacaccagggctgcctgcctccgttcccggcggacgtcttcatgattccccagtacggctacctgactctgaacaatggcagccaatcggtgggtcgttcctctttctactgcctggaatatttcccttctcaaatgctgagaacgggcaacaacttcaccttcagctacaccttcgaggacgttcccttccacagcagctacgcacacagccagagcctggaccggctgatgaatcctcttatcgaccagtacctgtattacctggccagaacacagagcaacgcaggaggcacagctggcaatcgggaactgcagttttatcagggcgggcctaccaccatggccgaacaagccaaaaactggctgcctggaccttgcttccggcaacaaagagtctccaagacgctggatcaaaacaacaacagcaactttgcttggactggtgccaccaaataccatctaaatggaagaaattcattggttaatcccggtgtcgccatggcaacccacaaggacgacgaggaacgcttcttcccttcgagcggagtcctgatttttggaaaaactggagcagctaataagactacactggaaaatgtgttaatgacaaatgaagaggaaattcgtcctaccaacccggtagccaccgaggaatacgggactgttagcagcaacctgcaggcggctaacactgcagcccagacacaagttgtcaacaaccagggagccttacctggtatggtctggcagaaccgggacgtgtacctgcagggtcccatctgggccaagattcctcacacggacggcaactttcacccgtctccgctgatgggcggctttggactgaagcatccgcctcctcagatcctgatcaaaaacactcctgttcctgctaatcccccggaggtgtttacgcctgccaagtttgcttctttcatcacacagtacagcaccggccaggtcagcgtggagatcgagtgggagctgcagaaggagaacagcaagcgctggaacccagagattcagtatacctccaattttgacgaacagactggtgtggactttgccgttgacagccagggtgtttattctgagcctcgccccattggtactcgttacctcacccgtaatctgtaa

SEQ ID NO: 444 - protein, 737 aa, Adeno-associated virus
MAADGYLPDWLEDNLSEGIREWWDLKPGAPKPKANQQKQDDGRGLVLPGYKYLGPFNGLDKGEPVSAADAAALEHDKACDQRLKAGDNPYLRYNHADAEFQERLQEDTSFGGNLGRAVFQAKKRVLEPLGLVEEAAKTAPGKKGPVEPSPQRSPDSSTGIGKKGQQPARKRLNFGQTGDSESVPDPQPIGEPPAGPSGLGSGTMAAGGGAPMADNNEGADGVGNASGNWHCDSTWLGDRVITTSTRTWALPTYNNHLYKQISSQSAGSTNDNVYFGYSTPWGYFDFNRFHCHFSPRDWQRLINNNWGFRPKKLNFKLFNIQVKEVTTNDGVTTIANNLTSTVQVFSDSEYQLPYVLGSAHQGCLPPFPADVFMIPQYGYLTLNNGSQSVGRSSFYCLEYFPSQMLRTGNNFTFSYTFEDVPFHSSYAHSQSLDRLMNPLIDQYLYYLARTQSNAGGTAGNRELQFYQGGPTTMAEQAKNWLPGPCFRQQRVSKTLDQNNNSNFAWTGATKYHLNGRNSLVNPGVAMATHKDDEERFFPSSGVLIFGKTGAANKTTLENVLMTNEEEIRPTNPVATEEYGTVSSNLQAANTAAQTQVVNNQGALPGMVWQNRDVYLQGPIWAKIPHTDGNFHPSPLMGGFGLKHPPPQILIKNTPVPANPPEVFTPAKFASFITQYSTGQVSVEIEWELQKENSKRWNPEIQYTSNFDEQTGVDFAVDSQGVYSEPRPIGTRYLTRNL

SEQ ID NO: 445 - DNA, 2214 bp, Adeno-associated virus
atggctgccgatggttatcttccagattggctcgaggacaacctctctgagggcattcgcgagtggtgggacctgaaacctggagccccgaaacccaaagccaaccagcaaaagcaggacgacggccggggtctggtgcttcctggctacaagtacctcggacccttcaacggactcgacaagggggagcccgtcaacgcggcggacgcagcggccctcgagcacgacaaggcctacgaccagcagctcaaagcgggtgacaatccgtacctgcggtataaccacgccgacgccgagtttcaggagcgtctgcaagaagatacgtcttttgggggcaacctcgggcgagcagtcttccaggccaagaagcgggttctcgaacctctcggtctggttgaggaagctgctaagacggctcctggaaagaagagaccggtagaaccgtcacctcagcgttcccccgactcctccacgggcatcggcaagaaaggccagcagcccgctagaaagagactgaactttgggcagactggcgactcagagtcagtccccgaccctcaaccaatcggagaaccaccagcaggcccctctggtctgggatctggtacaatggctgcaggcggtggcgctccaatggcagacaataacgaaggcgccgacggagtgggtaatgcctcaggaaattggcattgcgattccacatggctgggcgacagagtcatcaccaccagcacccgaacctgggctttgcccacctacaacaaccacctctacaagcaaatctccagtcagtcagcaggtagcaccaacgacaacgtctacttcggctacagcaccccctgggggtattttgacttcaacagattccactgtcacttctcaccacgtgactggcagcggctcatcaacaacaactggggattccggcccaagaagctcaacttcaagctgttcaacatccaggtcaaggaggtcacaacgaatgacggcgtcacgaccatcgccaataaccttaccagcacggttcaggtcttttcggactcggaataccagctgccctacgtcctcggctccgcacaccagggctgcctgcctccgttcccggcggacgtcttcatgattcctcagtacggctacctgactctcaacaacggtagtcaggccgtgggacgttcctccttctactgcctggagtacttcccctctcagatgctgagaacgggcaacaacttttccttcagctacactttcgaggacgtgcctttccacagcagctacgcgcacagccagagtttggacaggctgatgaatcctctcatcgaccagtacctgtactacctgtcaagaacccagtctacgggaggcacagcgggaacccagcagttgctgttttctcaggccgggcctagcaacatgtcgactcaggccagaaactggctgcctggaccctgctacagacagcagcgcgtctccacgacactgtcgcaaaacaacaacagcaactttgcctggactggtgccaccaagtatcatctgaacggcagagactctctggtgaatccgggcgtcgccatggcaaccaacaaggacgacgaggaccgcttcttcccatccagcggcatcctcatgtttggcaagcagggagctggaaaagacaacgtggactatagcaacgtgatgctaaccagcgaggaagaaatcaagaccaccaaccccgtggccacagaacagtatggcgtggtggctgataacctacagcagcaaaacaccgctcctattgtgggggccgtcaacagccagggagccttacctggcatggtctggcagaaccgggacgtgtacctgcagggtcctatttgggccaagattcctcacacagatggcaactttcacccgtctcctttaatgggcggctttggacttaaacatccgcctcctcagatccttatcaaaaacactcctgttcctgcggatcctccaacagcgttcaaccaggccaagctgaattctttcatcacgcagtacagcaccggacaagtcagcgtggagatcgagtgggagctgcagaaggagaacagcaagcgctggaacccagagattcagtatacttccaactactacaaatctacaaatgtggactttgctgttaatactgagggtgcttactctgagcctcgccccattggcactcgttacctcacccgtaatctgtaa

SEQ ID NO: 446 - protein, 737 aa, Adeno-associated virus
MAADGYLPDWLEDNLSEGIREWWDLKPGAPKPKANQQKQDDGRGLVLPGYKYLGPFNGLDKGEPVNAADAAALEHDKAYDQQLKAGDNPYLRYNHADAEFQERLQEDTSFGGNLGRAVFQAKKRVLEPLGLVEEAAKTAPGKKRPVEPSPQRSPDSSTGIGKKGQQPARKRLNFGQTGDSESVPDPQPIGEPPAGPSGLGSGTMAAGGGAPMADNNEGADGVGNASGNWHCDSTWLGDRVITTSTRTWALPTYNNHLYKQISSQSAGSTNDNVYFGYSTPWGYFDFNRFHCHFSPRDWQRLINNNWGFRPKKLNFKLFNIQVKEVTTNDGVTTIANNLTSTVQVFSDSEYQLPYVLGSAHQGCLPPFPADVFMIPQYGYLTLNNGSQAVGRSSFYCLEYFPSQMLRTGNNFSFSYTFEDVPFHSSYAHSQSLDRLMNPLIDQYLYYLSRTQSTGGTAGTQQLLFSQAGPSNMSTQARNWLPGPCYRQQRVSTTLSQNNNSNFAWTGATKYHLNGRDSLVNPGVAMATNKDDEDRFFPSSGILMFGKQGAGKDNVDYSNVMLTSEEEIKTTNPVATEQYGVVADNLQQQNTAPIVGAVNSQGALPGMVWQNRDVYLQGPIWAKIPHTDGNFHPSPLMGGFGLKHPPPQILIKNTPVPADPPTAFNQAKLNSFITQYSTGQVSVEIEWELQKENSKRWNPEIQYTSNYYKSTNVDFAVNTEGAYSEPRPIGTRYLTRNL

SEQ ID NO: 447 - DNA, 2217 bp, Adeno-associated virus
atggctgccgatggttatcttccagattggctcgaggacaacctctctgagggcattcgcgagtggtgggacctgaaacctggagccccgaaacccaaagccaaccagcaaaagcaggacgacggccggggtctggtgcttcctggctacaagtacctcggacccttcaacggactcgacaagggggagcccgtcaacgcggcggacgcagcggccctcgagcacgacaaggcctacgaccagcagctcaaagcgggtgacaatccgtacctgcggtataatcacgccgacgccgagtttcaggagcgtctgcaagaagatacgtcttttgggggcaacctcgggcgagcagtcttccaggccaagaagcgggttctcgaacctctcggtctggttgaggaaggcgctaagacggctcctggaaagaagagaccggtagagccgtcaccacagcgttcccccgactcctccacgggcatcggcaagaaaggccagcagcccgccagaaagagactcaatttcggtcagactggcgactcagagtcagtccccgaccctcaacctatcggagaacctccagcagcgccctctagtgtgggatctggtacaatggctgcaggcggtggcgcaccaatggcagacaataacgaaggtgccgacggagtgggtagttcctcgggaaattggcattgcgattccacatggctgggcgacagagtcatcaccaccagcacccgaacctgggccctgcccacctacaacaaccacctctacaagcaaatctccaacgggacctcgggaggcagcaccaacgacaacacctactttggctacagcaccccctgggggtattttgactttaacagattccactgccacttctcaccacgtgactggcagcgactcatcaacaacaactggggattccggcccaagagactcagcttcaagctcttcaacatccaggtcaaagaggtcacgcagaatgaaggcaccaagaccatcgccaataacctcaccagcaccatccaggtgtttacggactcggaataccagctgccgtacgtcctcggctctgcccaccagggctgcctgcctccgttcccggcggacgtcttcatgattcctcagtacggctacctgactctcaacaacggtagtcaggccgtgggacgttcctccttctactgcctggagtacttcccctctcagatgctgagaacgggcaacaacttttccttcagctacactttcgaggacgtgcctttccacagcagctacgcgcacagccagagtttggacaggctgatgaatcctctcatcgaccagtacctgtactacctgtcaagaacccagtctacgggaggcacagcgggaacccagcagttgctgttttctcaggccgggcctagcaacatgtcggctcaggccagaaactggctgcctggaccctgctacagacagcagcgcgtctccacgacactgtcgcaaaacaacaacagcaactttgcctggactggtgccaccaagtatcatctgaacggcagagactctctggtgaatccgggcgtcgccatggcaaccaacaaggacgacgaggaccgcttcttcccatccagcggcatcctcatgtttggcaagcagggagctggaaaagacaacgtggactatagcaacgtgatgctaaccagcgaggaagaaatcaaggccaccaaccccgtggccacagaacagtatggcgtggtggctgataacctacagcagcaaaacaccgctcctattgtgggggccgtcaacagccagggagccttacctggcatggtctggcagaaccgggacgtgtacctgcagggtcctatttgggccaagattcctcacacagatggcaactttcacccgtctcctttaatgggcggctttggacttaaacatccgcctcctcagatcctcatcaaaaacactcctgttcctgcggatcctccaacagcgttcaaccaggccaagctgaattctttcatcacgcagtacagcaccggacaagtcagcgtggagatcgagtgggagctgcagaaggagaacagcaagcgctggaacccagagattcagtatacttccaactactacaaatctacaaatgtggactttgctgttaatactgagggtgtttactctgagcctcgccccattggcactcgttacctcacccgtaatctgtaa

SEQ ID NO: 448 - protein, 738 aa, Adeno-associated virus
MAADGYLPDWLEDNLSEGIREWWDLKPGAPKPKANQQKQDDGRGLVLPGYKYLGPFNGLDKGEPVNAADAAALEHDKAYDQQLKAGDNPYLRYNHADAEFQERLQEDTSFGGNLGRAVFQAKKRVLEPLGLVEEGAKTAPGKKRPVEPSPQRSPDSSTGIGKKGQQPARKRLNFGQTGDSESVPDPQPIGEPPAAPSSVGSGTMAAGGGAPMADNNEGADGVGSSSGNWHCDSTWLGDRVITTSTRTWALPTYNNHLYKQISNGTSGGSTNDNTYFGYSTPWGYFDFNRFHCHFSPRDWQRLINNNWGFRPKRLSFKLFNIQVKEVTQNEGTKTIANNLTSTIQVFTDSEYQLPYVLGSAHQGCLPPFPADVFMIPQYGYLTLNNGSQAVGRSSFYCLEYFPSQMLRTGNNFSFSYTFEDVPFHSSYAHSQSLDRLMNPLIDQYLYYLSRTQSTGGTAGTQQLLFSQAGPSNMSAQARNWLPGPCYRQQRVSTTLSQNNNSNFAWTGATKYHLNGRDSLVNPGVAMATNKDDEDRFFPSSGILMFGKQGAGKDNVDYSNVMLTSEEEIKATNPVATEQYGVVADNLQQQNTAPIVGAVNSQGALPGMVWQNRDVYLQGPIWAKIPHTDGNFHPSPLMGGFGLKHPPPQILIKNTPVPADPPTAFNQAKLNSFITQYSTGQVSVEIEWELQKENSKRWNPEIQYTSNYYKSTNVDFAVNTEGVYSEPRPIGTRYLTRNL

SEQ ID NO: 449 - DNA, 2217 bp, Adeno-associated virus
atggctgccgatggttatcttccagattggctcgaggacaacctctctgagggcattcgcgagtggtgggacctgaaacctggagccccgaaacccaaagccaaccagcaaaagcaggacgacggccggggtctggtgcttcctggctacaagcacctcggacccttcaacggactcgacaagggggagcccgtcaacgcggcggacgcagcggccctcgagcacgacaaggcctacgaccagcagctcaaagcgggtgacaatccgtacctgcggtataatcacgctgacgccgagtttcaggagcgtctgcaagaagatacgtcttttgggggcaacctcgggcgagcagtcttccaggccaagaagcgggttctcgaacctctcggtctggttgaggaaggcgctaagacggctcctggaaagaagagaccggtagagccgtcaccacagcgttcccccgactcctccacgggcatcggcaagaaaggccagcagcccgccagaaagagactcaatttcggtcagactggcgactcagagtcagtccccgaccctcaacctatcggagaacctccagcagcgccctctagtgtgggatctggtacaatggctgcaggcggtggcgcaccaatggcagacaataacgaaggtgccgacggagtgggtagttcctcgggaaattggcattgcgattccacatggctgggcgacagagtcatcaccaccagcacccgaacctgggccctgcccacctacaacaaccacctctacaagcaaatctccaacgggacctcgggaggcagcaccaacgacaacacctactttggctacagcaccccctgggggtattttgactttaacagattccactgccacttctcaccacgtgactggcagcgactcatcaacaacaactggggattccggcccaagagactcagcttcaagctcttcaacatccaggtcaaagaggtcacgcagaatgaaggcaccaagaccatcgccaataaccttaccagcacggttcaggtcttttcggactcggaataccagctgccctacgtcctcggctccgcacaccagggctgcctgcctccgttcccggcggacgtcttcatgattccccagtacggctacctgactctgaacaatggcagccaatcggtgggtcgttcctctttctactgcctggaatatttcccttctcaaatgctgagaacgggcaacaacttcaccttcagctacaccttcgaggacgttcccttccacagcagctacgcacacagccagagcctggaccggctgatgaatcctcttatcgaccagtacctgtattacctggccagaacacagagcaacgcaggaggcacagctggcaatcgggaactgcagttttatcagggcgggcctaccaccatggccgaacaagccaaaaactggctgcctggaccttgcttccggcaacaaagagtctccaagacgctggatcaaaacaacaacagcaactttgcttggactggtgccaccaaataccatctaaatggaagaaattcattggttaatcccggtgtcgccatggcaacccacaaggacgacgaggaacgcttcttcccttcgagcggagtcctgatttttggaaaaactggagcagctaataagactacactggaaaatgtgttaatgacaaatgaagaggaaattcgtcctaccaacccggtagccaccgaggaatacgggactgttagcagcaacctgcaggcggctaacactgcagcccagacacaagttgtcaacaaccagggagccttacctggtatggtctggcagaaccgggacgtgtacctgcagggtcccatctgggccaagattcctcacacggacggcaactttcacccgtctccgctgatgggcggctttggactgaagcatccgcctcctcagatcctgatcaaaaacactcctgttcctgctaatcccccggaggtgtttacgcctgccaagtttgcttctttcatcacacagtacagcaccggccaggtcagcgtggagatcgagtgggagctgcagaaggagaacagcaagcgctggaacccagagattcagtatacctccaattttgacaaacagactggtgtggactttgccgttgacagccagggtgtttattctgagcctcgccccattggtactcgttacctcacccgtaatctgtaa

SEQ ID NO: 450 - protein, 738 aa, Adeno-associated virus
MAADGYLPDWLEDNLSEGIREWWDLKPGAPKPKANQQKQDDGRGLVLPGYKHLGPFNGLDKGEPVNAADAAALEHDKAYDQQLKAGDNPYLRYNHADAEFQERLQEDTSFGGNLGRAVFQAKKRVLEPLGLVEEGAKTAPGKKRPVEPSPQRSPDSSTGIGKKGQQPARKRLNFGQTGDSESVPDPQPIGEPPAAPSSVGSGTMAAGGGAPMADNNEGADGVGSSSGNWHCDSTWLGDRVITTSTRTWALPTYNNHLYKQISNGTSGGSTNDNTYFGYSTPWGYFDFNRFHCHFSPRDWQRLINNNWGFRPKRLSFKLFNIQVKEVTQNEGTKTIANNLTSTVQVFSDSEYQLPYVLGSAHQGCLPPFPADVFMIPQYGYLTLNNGSQSVGRSSFYCLEYFPSQMLRTGNNFTFSYTFEDVPFHSSYAHSQSLDRLMNPLIDQYLYYLARTQSNAGGTAGNRELQFYQGGPTTMAEQAKNWLPGPCFRQQRVSKTLDQNNNSNFAWTGATKYHLNGRNSLVNPGVAMATHKDDEERFFPSSGVLIFGKTGAANKTTLENVLMTNEEEIRPTNPVATEEYGTVSSNLQAANTAAQTQVVNNQGALPGMVWQNRDVYLQGPIWAKIPHTDGNFHPSPLMGGFGLKHPPPQILIKNTPVPANPPEVFTPAKFASFITQYSTGQVSVEIEWELQKENSKRWNPEIQYTSNFDKQTGVDFAVDSQGVYSEPRPIGTRYLTRNL

SEQ ID NO: 451 - protein, 737 aa, Adeno-associated virus
MAADGYLPDWLEDNLSEGIREWWDLKPGAPKPKANQQKQDDGRGLVLPGYKYLGPFNGLDKGEPVNAADAAALEHDKAYDQQLKAGDNPYLRYNHADAEFQERLQEDTSFGGNLGRAVFQAKKRVLEPLGLVEEAAKTAPGKKRPVEPSPQRSPDSSTGIGKKGQQPARKRLNFGQTGDSESVPDPQPIGEPPAGPSGLGSGTMAAGGGAPMADNNKGADGVGNASGNWHCDSTWLGDRVITTSTRTWALPTYNNHLYKQISSQSAGSTNDNVYFGYSTPWGYFDFNRFHCHFSPRDWQRLINSNWGFRPKKLNFKLFNIQVKEVTTNDGVTTIANNLTSTVQVFSDSEYQLPYVLGSAHQGCLPPFPADVFMIPQYGYLTLNNGSQSVGRSSFYCLEYFPSQMLRTGNNFTFSYTFEDVPFHSSYAHSQSLDRLMNPLIDQYLYYLARTQSNAGGTAGNRELQFYQGGPTTMAEQAKNWLPGPCFRQQRVSKTLDQNNNSNFAWTGATKYHLNGRNSLVNPGVAMATHKDDEERFFPSSGVLIFGKTGAANKTTLENVLMTNEEEIRPTNPVATEEYGTVSSNLQAANTAAQTQVVNNQGALPGMVWQNRDVYLQGPIWAKIPHTDGNFHPSPLMGGFGLKHPPPQILIKNTPVPANPPEVFTPAKFASFITQYSTGQVSVEIEWELQKENSKRWNPEIQYTSNFDKQTGVDFAVDSQGVYSEPRPIGTRYLTRNL

SEQ ID NO: 452 - protein, 737 aa, Adeno-associated virus
MAADGYLPDWLEDNLSEGIREWWDLKPGAPKPKANQQKQDDGRGLVLPGYKYLGPFNGLDKGEPVNAADAAALEHDKAYDQQLKAGDNPYLRYNHADAEFQERLQEDTSFGGNLGRAVFQAKKRVLEPLGLVEEAAKTAPGKKRPVEPSPQRSPDSSTGIGKKGQQPARKRLNFGQTGDSESVPDPQPIGEPPAGPSGLGSGTMAAGGGAPMADNNEGADGVGNASGNWHCDSTWLGDRVITTSTRTWALPTYNNHLYKQISSQSAGSTNDNVYFGYSTPWGYFDFNRFHCHFSPRDWQRLINSNWGFRPKKLNFKLFNIQVKEVTTNDGVTTIANNLTSTVQVFSDSEYQLPYVLGSAHQGCLPPFPADVFMIPQYGYLTLNNGSQSVGRSSFYCLEYFPSQMLRTGNNFTFSYTFEDVPFHSSYAHSQSLDRLMNPLIDQYLYYLARTQSNAGGTAGNRELQFYQGGPTTMAEQAKNWLPGPCFRQQRVSKTLDQNNNSNFAWTGATKYHLNGRNSLVNPGVAMATHKDDEERFFPSSGVLIFGKTGAANKTTLENVLMTNEEEIRPTNPVATEEYGTVSSNLQAANTAAQTQVVNNQGALPGMVWQNRDVYLQGPIWAKIPHTDGNFHPSPLMGGFGLKHPPPQILIKNTPVPANPPEVFTPAKFASFITQYSTGQVSVEIEWELQKENSKRWNPEIQYTSNFDKQTGVDFAVDSQGVYSEPRPIGTRYLTRNL

SEQ ID NO: 453 - protein, 737 aa, Adeno-associated virus
MAADGYLPDWLEDNLSEGIREWWDLKPGAPKPKANQQKQDDGRGLVLPGYKYLGPFNGLDKGEPVNAADAAALEHDKAYDQQLKAGDNPYLRYNHADAEFQERLQEDTSFGGNLGRAVFQAKKRVLEPLGLVEEAAKTAPGKKRPVEPSPQRSPDSSTGIGKKGQQPARKRLNFGQTGDSESVPDPQPIGEPPAGPSGLGSGTMAAGGGAPMADNNEGADGVGNASGNWHCDSTWLGDRVITTSTRTWALPTYNNHLYKQISSQSAGSTNDNVYFGYSTPWGYFDFNRFHCHFSPRDWQRLINNNWGFRPKKLNFKLFNIQVKEVTTNDGVTTIANNLTSTVQVFSDSEYQLPYVLGSAHQGCLPPFPADVFMIPQYGYLTLNNGSQSVGRSSFYCLEYFPSQMLRTGNNFTFSYTFEDVPFHSSYAHSQSLDRLMNPLIDQYLYYLARTQSNAGGTAGNRELQFYQGGPTTMAEQAKNWLPGPCFRQQRVSKTLDQNNNSNFAWTGATKYHLNGRNSLVNPGVAMATHKDDEERFFPSSGVLIFGKTGAANKTTLENVLMTNEEEIRPTNPVATEEYGTVSSNLQAANTAAQTQVVNNQGALPGMVWQNRDVYLQGPIWAKIPHTDGNFHPSPLMGGFGLKHPPPQILIKNTPVPANPPEVFTPAKFASFITQYSTGQVSVEIEWELQKENSKRWNPEIQYTSNFDKQTGVDFAVDSQGVYSEPRPIGTRYLTRNL

SEQ ID NO: 454 - protein, 737 aa, Adeno-associated virus
MAADGYLPDWLEDNLSEGIREWWDLKPGAPKPKANQQKQDDGRGLVLPGYKYLGPFNGLDKGEPVNAADAAALEHDKAYDQQLKAGDNPYLRYNHADAEFQERLQEDTSFGGNLGRAVFQAKKRVLEPLGLVEEAAKTAPGKKRPVEPSPQRSPDSSTGIGKKGQQPARKRLNFGQTGDSESVPDPQPIGEPPAGPSGLGSGTMAAGGGAPMADNNKGADGVGNASGNWHCDSTWLGDRVITTSTRTWALPTYNNHLYKQISSQSAGSTNDNVYFGYSTPWGYFDFNRFHCHFSPRDWQRLINNNWGFRPKKLNFKLFNIQVKEVTTNDGVTTIANNLTSTVQVFSDSEYQLPYVLGSAHQGCLPPFPADVFMIPQYGYLTLNNGSQSVGRSSFYCLEYFPSQMLRTGNNFTFSYTFEDVPFHSSYAHSQSLDRLMNPLIDQYLYYLARTQSNAGGTAGNRELQFYQGGPTTMAEQAKNWLPGPCFRQQRVSKTLDQNNNSNFAWTGATKYHLNGRNSLVNPGVAMATHKDDEERFFPSSGVLIFGKTGAANKTTLENVLMTNEEEIRPTNPVATEEYGTVSSNLQAANTAAQTQVVNNQGALPGMVWQNRDVYLQGPIWAKIPHTDGNFHPSPLMGGFGLKHPPPQILIKNTPVPANPPEVFTPAKFASFITQYSTGQVSVEIEWELQKENSKRWNPEIQYTSNFDKQTGVDFAVDSQGVYSEPRPIGTRYLTRNL

SEQ ID NO: 455 - DNA, 2214 bp, Adeno-associated virus
atggctgctgacggttatcttccagattggctcgaggacaacctctctgagggcattcgcgagtggtgggacctgaaacctggagcccccaagcccaaggccaaccagcagaagcaggacgacggccggggtctggtgcttcctggctacaagtacctcggacccttcaacggactcgacaagggggagcccgtcaacgcggcggacgcagcggccctcgagcacgacaaggcctacgaccagcagctcaaagcgggtgacaatccgtacctgcggtataaccacgccgacgccgagtttcaggagcgtctgcaagaagatacgtcttttgggggcaacctcgggcgagcagtcttccaggccaagaagcgggttctcgaacctctcggtctggttgaggaagctgctaagacggctcctggaaagaagagaccggtagaaccgtcacctcagcgttcccccgactcctccacgggcatcggcaagaaaggccagcagcccgctagaaagagactgaactttgggcagactggcgactcagagtcagtccccgaccctcaaccaatcggagaaccaccagcaggcccctctggtctgggatctggtacaatggctgcaggcggtggcgcaccaatggctgacaataacaagggcgccgacggagtgggtaatgcctcaggaaattggcattgcgattccacatggctgggcgacagagtcatcaccaccagcacccgaacctgggctttgcccacctacaacaaccacctctacaagcaaatctccagtcagtcagcaggtagcaccaacgacaacgtctacttcggctacagcaccccctgggggtattttgacttcaacagattccactgtcacttctcaccacgtgactggcagcggctcatcaacagcaactggggattccggcccaagaagctcaacttcaagctgttcaacatccaggtcaaggaggtcacaacgaatgacggcgtcacgaccatcgccaataaccttaccagcacggttcaggtcttttcggactcggaataccagctgccctacgtcctcggctccgcacaccagggctgcctgcctccgttcccggcggacgtcttcatgattccccagtacggctacctgactctgaacaatggcagccaatcggtgggtcgttcctctttctactgcctggaatatttcccttctcaaatgctgagaacgggcaacaacttcaccttcagctacaccttcgaggacgttcccttccacagcagctacgcacacagccagagcctggaccggctgatgaatcctcttatcgaccagtacctgtattacctggccagaacacagagcaacgcaggaggcacagctggcaatcgggaactgcagttttatcagggcgggcctaccaccatggccgaacaagccaaaaactggctgcctggaccttgcttccggcaacaaagagtctccaagacgctggatcaaaacaacaacagcaactttgcttggactggtgccaccaaataccatctaaatggaagaaattcattggttaatcccggtgtcgccatggcaacccacaaggacgacgaggaacgcttcttcccttcgagcggagtcctgatttttggaaaaactggagcagctaataagactacactggaaaatgtgttaatgacaaatgaagaggaaattcgtcctaccaacccggtagccaccgaggaatacgggactgttagcagcaacctgcaggcggctaacactgcagcccagacacaagttgtcaacaaccagggagccttacctggtatggtctggcagaaccgggacgtgtacctgcagggtcccatctgggccaagattcctcacacggacggcaactttcacccgtctccgctgatgggcggctttggactgaagcatccgcctcctcagatcctgatcaaaaacactcctgttcctgctaatcccccggaggtgtttacgcctgccaagtttgcttctttcatcacacagtacagcaccggccaggtcagcgtggagatcgagtgggagctgcagaaggagaacagcaagcgctggaacccagagattcagtatacctccaattttgacaaacagactggtgtggactttgccgttgacagccagggtgtttattctgagcctcgccccattggtactcgttacctcacccgtaatctgtaa

SEQ ID NO: 456 - DNA, 2217 bp, Adeno-associated virus
atggctgccgatggttatcttccagattggctcgaggacaacctctctgagggcattcgcgagtggtgggacctgaaacctggagccccgaaacccaaagccaaccagcaaaagcaggacgacggccggggtctggtgcttcctggctacaagtacctcggacccttcaacggactcgacaagggggagcccgtcaacgcggcggacgcagcggccctcgagcacgacaaggcctacgaccagcagctcaaagcgggtgacaatccgcacctgcggtataatcacgccgacgccgagtttcaggagcgtctgcaagaagatacgtcttttgggggcaacctcgggcgagcagtcttccaggccaagaagcgggttctcgaacctctcggtctggttgaggaaggcgctaagacggctcctggaaagaagagaccggtagagccgtcaccacagcgttcccccgactcctccacgggcatcggcaagaaaggccagcagcccgccagaaagagactcaatttcggtcagactggcgactcagagtcagtccccgaccctcaacttatcggagaacctccagcagcgccctctagtgtgggatctggtacaatggctgcaggcggtggcgcaccaatggcagacaataacgaaggtgccgacggagtgggtagttcctcgggaaattggcattgcgattccacatggctgggcgacagagtcatcaccaccagcacccgaacctgggccctgcccacctacaacaaccacctctacaagcaaatctccaacgggacctcgggaggcagcaccaacgacaacacctactttggctacagcaccccctgggggtattttgactttaacagattccactgccacttctcaccacgtgactggcagcgactcatcaacaacaactggggattccggcccaagagactcagcttcaagctcttcaacatccaggtcaaagaggtcacgcagaatgaaggcaccaagaccatcgccaataacctcaccagcaccatccaggtgtttacggactcggagtaccagctgccgtacgtcctcggctctgcccaccagggctgcctgcctccgttcccggcggacgtcttcatgattcctcagtacggcaacctgactctcaacaacggtagtcaggccgtgggacgttcctccttctactgcctggagtacttcccctctcagatgctgagaacgggcaacaacttttccttcagctacactttcgaggacgtgcctttccacagcagctacgcgcacagccagagtttggacaggctgatgaatcctctcatcgaccagtacctgtactacctgtcaagaacccagtctacgggaggcacagcgggaacccagcagttgctgttttctcaggccgggcctagcaacatgtcggctcaggccagaaactggctgcctggaccctgctacagacagcagcgcgtctccacgacactgtcgcaaaacaacaacagcaactttgcctggactggtgccaccaagtatcatctgaacggcagagactctctggtgaatccgggcgtcgccatggcaaccaacaaggacgacgaggaccgcttcttcccatccagcggcatcctcatgtttggcaagcagggagctggaaaagacaacatgggctatagcaacgtgatgctaaccagcgaggaagaaatcaagaccaccaaccccgtggccacagaacagtatggcgtggtggctgataacctacagcagcaaaacaccgctcctattgtgggggccgtcaacagccagggagccttacctggcatggtctggcagaaccgggacgtgtacctgcagggtcctatttgggccaagattcctcacacagatggcaactttcacccgtctcctttaatgggcggctttggacttaaacatccgcctcctcagatcctcatcaaaaacactcctgttcctgcggatcctccaacagcgttcaaccaggccaagctgaattctttcatcacgcagtacggcaccggacaagtcagcgtggagatcgagtgggagctgcagaaggagaacagcaagcgctggaacccagagattcagtatacttccaactactacaaatctacaaatgtggactttgctgttaatactgagggtgtttactctgagcctcgccccattggcactcgttacctcacccgtaatctgtaa

SEQ ID NO: 457 - protein, 738 aa, Adeno-associated virus
MAADGYLPDWLEDNLSEGIREWWDLKPGAPKPKANQQKQDDGRGLVLPGYKYLGPFNGLDKGEPVNAADAAALEHDKAYDQQLKAGDNPHLRYNHADAEFQERLQEDTSFGGNLGRAVFQAKKRVLEPLGLVEEGAKTAPGKKRPVEPSPQRSPDSSTGIGKKGQQPARKRLNFGQTGDSESVPDPQLIGEPPAAPSSVGSGTMAAGGGAPMADNNEGADGVGSSSGNWHCDSTWLGDRVITTSTRTWALPTYNNHLYKQISNGTSGGSTNDNTYFGYSTPWGYFDFNRFHCHFSPRDWQRLINNNWGFRPKRLSFKLFNIQVKEVTQNEGTKTIANNLTSTIQVFTDSEYQLPYVLGSAHQGCLPPFPADVFMIPQYGNLTLNNGSQAVGRSSFYCLEYFPSQMLRTGNNFSFSYTFEDVPFHSSYAHSQSLDRLMNPLIDQYLYYLSRTQSTGGTAGTQQLLFSQAGPSNMSAQARNWLPGPCYRQQRVSTTLSQNNNSNFAWTGATKYHLNGRDSLVNPGVAMATNKDDEDRFFPSSGILMFGKQGAGKDNMGYSNVMLTSEEEIKTTNPVATEQYGVVADNLQQQNTAPIVGAVNSQGALPGMVWQNRDVYLQGPIWAKIPHTDGNFHPSPLMGGFGLKHPPPQILIKNTPVPADPPTAFNQAKLNSFITQYGTGQVSVEIEWELQKENSKRWNPEIQYTSNYYKSTNVDFAVNTEGVYSEPRPIGTRYLTRNL

SEQ ID NO: 458 - DNA, 2217 bp, Adeno-associated virus
atggctgccgatggttatcttccagattggctcgaggacaacctctctgagggcattcgcgagtggtgggacctgaaacctggagccccgaaacccaaagccaaccagcaaaagcaggacgacggccggggtctggtgcttcctggctacaagtacctcggacccttcaacggactcgacaagggggagcccgtcaacgcggcggacgcagcggccctcgagcacgacaaggcctacgaccagcagctcaaagcgggtgacaatccgtacctgcggtataatcacgccgacgccgagtttcaggagcgtctgcaagaagatacgtcttttgggggcaacctcgggcgagcagtcttccaggccaagaagcgggttctcgaacctctcggtctggttgaggaaggcgctaagacggctcctggaaagaagagaccggtagagccgtcaccacagcgttcccccgactcctccacgggcatcggcaagaaaggccagcagcccgccggaaagagactcaatttcggtcagactggcgactcagagtcagtccccgaccctcaacctatcggagaacctccagcagcgccctctagtgtgggatctggtacaatggctgcaggcggtggcgcaccaatggcagacaataacgaaggtgccgacggagtgggtagttcctcgggaaattggcattgcgattccacatggctgggcgacagagtcatcaccaccagcacccgaacctgggccctgcccacctacaacaaccacctctacaagcaaatctccaacgggacctcgggaggcagcaccaacgacaacacctactttggctacagcaccccctgggggtattttgactttaacagattccactgccacttctcaccacgtgactggcagcgactcatcaacaacaactggggattccggcccaagagactcagcttcaagctcttcaacatccaggtcaaagaggtcacgcagaatgaaggcaccaagaccatcgccaataacctcaccagcaccatccaggtgtttacggactcggaataccagctgccgtacgtcctcggctctgcccaccagggctgcctgcctccgttcccggcggacgtcttcatgattcctcagtacggctacctgactctcaacaacggtagtcaggccgtgggacgttcctccttctactgcctggagtacttcccctctcagatgctgagaacgggcaacaacttttccttcagctacactttcgaggacgtgcctttccacagcagctacgcgcacagccagagtttggacaggctgatgaatcctctcgtcgaccagtacctgtactacctgtcaagaacccagtctacgggaggcacagcgggaacccagcagttgctgttttctcaggccgggcctagcaacatgtcggctcaggccagaaactggctgcctggaccctgctacagacagcagcgcgtctccacgacactgtcgcaaaacaacaacagcaactttgcctggactggtgccaccaagtatcatctgaacggcagagactctctggtgaatccgggcgtcgccatggcaaccaacaaggacgacgaggaccgcttcttcccatccagcggcatcctcatgtttggcaagcagggagctggaaaagacaacgtggactatagcaacgtgatgctaaccagcgaggaagaaatcaagaccaccaaccccgtggccacagaacagtatggcgtggtggctgataacctacagcagcaaaacaccgctcctattgtgggggccgtcaacagccagggagccttacctggcatggtctggcagaaccgggacgtgtacctgcagggtcctatttgggccaagattcctcacacagatggcaactttcacccgtctcctttaatgggcggctttggacttaaacatccgcctcctcagatcctcatcaaaaacactcctgttcctgcggatcctccaacagcgttcaaccaggccaagctgaattctttcatcacgcagtacagcaccggacaagtcagcgtggagatcgagtgggagctgcagaaggagaacagcaagcgctggagcccagagattcagtatacttccaactactacaaatctacaaatgtggactttgctgttaatactgagggtgtttactctgagcctcgccccattggcactcgttacctcacccgtaatctgtaa

SEQ ID NO: 459 - protein, 738 aa, Adeno-associated virus
MAADGYLPDWLEDNLSEGIREWWDLKPGAPKPKANQQKQDDGRGLVLPGYKYLGPFNGLDKGEPVNAADAAALEHDKAYDQQLKAGDNPYLRYNHADAEFQERLQEDTSFGGNLGRAVFQAKKRVLEPLGLVEEGAKTAPGKKRPVEPSPQRSPDSSTGIGKKGQQPAGKRLNFGQTGDSESVPDPQPIGEPPAAPSSVGSGTMAAGGGAPMADNNEGADGVGSSSGNWHCDSTWLGDRVITTSTRTWALPTYNNHLYKQISNGTSGGSTNDNTYFGYSTPWGYFDFNRFHCHFSPRDWQRLINNNWGFRPKRLSFKLFNIQVKEVTQNEGTKTIANNLTSTIQVFTDSEYQLPYVLGSAHQGCLPPFPADVFMIPQYGYLTLNNGSQAVGRSSFYCLEYFPSQMLRTGNNFSFSYTFEDVPFHSSYAHSQSLDRLMNPLVDQYLYYLSRTQSTGGTAGTQQLLFSQAGPSNMSAQARNWLPGPCYRQQRVSTTLSQNNNSNFAWTGATKYHLNGRDSLVNPGVAMATNKDDEDRFFPSSGILMFGKQGAGKDNVDYSNVMLTSEEEIKTTNPVATEQYGVVADNLQQQNTAPIVGAVNSQGALPGMVWQNRDVYLQGPIWAKIPHTDGNFHPSPLMGGFGLKHPPPQILIKNTPVPADPPTAFNQAKLNSFITQYSTGQVSVEIEWELQKENSKRWSPEIQYTSNYYKSTNVDFAVNTEGVYSEPRPIGTRYLTRNL

SEQ ID NO: 460 - DNA, 2217 bp, Adeno-associated virus
atggttgccgatggttatcttccagattggctcgaggacaacctctctgagggcattcgcgagtggtgggacctgaaacctggagccccgaaacccaaagccaaccagcaaaagcagggcgacggccggggtctggtgcttcctggctacaagtacctcggacccttcaacggactcgacaagggggagcccgtcaacgcggcggacgcagcggccctcgagcacgacaaggcctacgaccagcagcttaaagcgggtgacaatccgtacctgcggtataatcacgccgacgccgagcttcaggagcgtctgcaagaagatacgtcttttgggggcaacctcgggcgagcagtcttccaggccaagaagcgggttctcgaacctctcggtctggttgaggaaggcgctaagacggctcctggaaagaagagaccggtagagccgtcaccacagcgttcccccgactcctccacgggcatcggcaagaaaggccagcagcccgccagaaagagactcaatttcggtcagactggcgactcagagtcagtccccgaccctcaacctatcggagaacctccagcagcgccctctagtgtgggatctggtacaatggctgcaggcggtggcgcgccaatggcagacaataacgaaggtgccgacggagtgggtagttcctcgggaaattggcattgcgattccacatggctgggcgacagagtcatcaccaccagcacccgaacctgggccctgcccacctacaacaaccacctctacaagcaaatctccaacgggacctcgggaggcagcaccaacgacaacacctactttggctacagcaccccctgggggtattttgactttaacagattccactgccacttctcaccacgtgactggcagcgactcatcaacaacaactggggattccggcccaagagactcagcttcaagctcttcaacatccaggtcaaagaggtcacgcagaatgaaggcaccaagaccatcgccaataacctcaccagcaccatccaggtgtttacggactcggaataccagctgccgtacgtcctcggctctgcccaccagggctgccagcctccgttcccggcggacgtcttcatgattcctcagtacggctacctgactctcaacaacggtagtcaggccgtgggacgttcctccttctactgcctggagtacttcccctctcagatgctgagaacgggcaacaacttttccttcagctacactttcgaggacgtgcctttccacagcagctacgcgcacagccagagtttggacaggctgatgaatcctctcatcgaccagtacctgtactacctgtcaagaacccagtctacgggaggcacagcgggaacccagcagttgctgttttctcaggccgggcctagcaacatgtcggctcaggccagaaactggctgcctggaccctgctacagacagcagcgcgtctccacgacactgtcgcaaaacaacaacagcaactttgcctggactggtgccaccaagtatcatctgaacggcagagactctctggtgaatccgggcgtcgccatggcaaccaacaaggacgacgaggaccgcttcttcccatccagcggcatcctcatgtttggcaagcagggagctggaaaagacaacgtggactatagcaacgtgatgctaaccagcgaggaagaaatcaagaccaccaaccccgtggccacagaacagtatggcgtggtggctgataacctacagcagcaaaacaccgctcctattgtgggggccgtcaacagccagggagccttacctggcatggtctggcagaaccgggacgtgtacctgcagggtcctatttgggccaagattcctcacacagatggcaactttcacccgtctcctttaatgggcggctttggacttaaacatccgcctcctcagatcctcatcaaaaacactcctgttcctgcggatcctccaacagcgttcaaccaggccaagctgaattctttcatcacgcagtacagcaccggacaagtcagcgtggagatcgagtgggagccgcagaaggagaacagcaagcgctggaacccagagattcagtatacttccaactactacaaatctacaaatgtggactttgctgttaatactgagggtgtttactctgagcctcgccccattggcactcgttacctcacccgtaatctgtaa

SEQ ID NO: 461 - protein, 738 aa, Adeno-associated virus
MVADGYLPDWLEDNLSEGIREWWDLKPGAPKPKANQQKQGDGRGLVLPGYKYLGPFNGLDKGEPVNAADAAALEHDKAYDQQLKAGDNPYLRYNHADAELQERLQEDTSFGGNLGRAVFQAKKRVLEPLGLVEEGAKTAPGKKRPVEPSPQRSPDSSTGIGKKGQQPARKRLNFGQTGDSESVPDPQPIGEPPAAPSSVGSGTMAAGGGAPMADNNEGADGVGSSSGNWHCDSTWLGDRVITTSTRTWALPTYNNHLYKQISNGTSGGSTNDNTYFGYSTPWGYFDFNRFHCHFSPRDWQRLINNNWGFRPKRLSFKLFNIQVKEVTQNEGTKTIANNLTSTIQVFTDSEYQLPYVLGSAHQGCQPPFPADVFMIPQYGYLTLNNGSQAVGRSSFYCLEYFPSQMLRTGNNFSFSYTFEDVPFHSSYAHSQSLDRLMNPLIDQYLYYLSRTQSTGGTAGTQQLLFSQAGPSNMSAQARNWLPGPCYRQQRVSTTLSQNNNSNFAWTGATKYHLNGRDSLVNPGVAMATNKDDEDRFFPSSGILMFGKQGAGKDNVDYSNVMLTSEEEIKTTNPVATEQYGVVADNLQQQNTAPIVGAVNSQGALPGMVWQNRDVYLQGPIWAKIPHTDGNFHPSPLMGGFGLKHPPPQILIKNTPVPADPPTAFNQAKLNSFITQYSTGQVSVEIEWEPQKENSKRWNPEIQYTSNYYKSTNVDFAVNTEGVYSEPRPIGTRYLTRNL

SEQ ID NO: 462 - DNA, 2217 bp, Adeno-associated virus
atggctgccgatggttatcttccagattggctcgaggacaacctctctgagggcattcgcgagtggtgggacctgaaacctggagccccgaaacccaaagccaaccagcaaaagcaggacgacggccggggtctggtgcttcctggctacaagtacctcggacccttcaacggactcgacaagggggagcccgtcaacgcggcggacgcagcggccctcgagcacgacaaggcctacgaccagcagctcaaagcgggtgacaatccgtacctgcggtataatcacgccgacgccgagtttcaggagcgtctgcaagaagatacgtcttttgggggcaacctcgggcgagcagtcttccaggccaagaagcgggttctcgaacctctcggtctggttgaggaaggcgctaagacggctcctggaaagaagagaccggtagagccgtcaccacagcgttcccccgactcctccacgggcatcggcaagaaaggccagcagcccgccagaaagagactcaatttcggtcagactggcgactcagagtcagtccccgaccctcaacctatcggagaacctccagcagcgccctctagtgtgggatctggtacaatggctgcaggcggtggcgcaccaatggcagacaataacgaaggtgccgacggagtgggtagttcctcgggaaattggcattgcgattccacatggctgggcgacagagtcatcaccaccagcacccgaacctgggccctgcccacctacaacaaccacctctacaagcaaatctccaacgggacctcgggaggcagcaccaacgacaacacctactttggctacagcaccccctgggggtattttgactttaacagattccactgccacttctcaccacgtgactggcagcgactcatcaacaacaactggggattccggcccaagagactcagcttcaagctcttcaacatccaggtcaaagaggtcacgcagaatgaaggcaccaagaccatcgccaatagcctcaccagcaccatccaggtgtttacggactcggaataccagctgccgtacgtcctcggctctgcccaccagggctgcctgcctccgttcccggcggacgtcttcatgattcctcagtacggctacctgactcccaacaacggtagtcaggccgtgggacgttcctccttctactgcctggagtacttcccctctcagatgctgagaacgggcaacaacttttccttcagctacactttcgaggacgtgcctttccacagcagctacgcgcacagccagagtttggacaggctgatgaatcctctcatcgaccagtacctgtactacctgtcaagaacccagtctacgggaggcacagcgggaacccagcagttgctgtcttctcaggccgggcctagcaacatgtcggctcaggccagaaactggctgcctggaccctgctacagacagcagcgcgtctccacgacactgtcgcaaaacaacaacagcaactttgcctggactggtgccaccaagtatcatctgaacggcagagactctctggtgaatccgggcgtcgccatggcaaccaacaaggacgacgaggaccgcttcttcccatccagcggcatcctcatgtttggcaagcagggagctggaaaagacaacgtggactatagcaacgtgatgctaaccagcgaggaagaaatcaagaccaccaaccccgtggccacagaacagtatggcgtggtggctgataacctacagcagcaaaacaccgctcctattgtgggggccgtcaacagccagggagccttacctggcatggtctggcagaaccgggacgtgtacttgcagggtcctatttgggccaagattcctcacacagatggcaactttcacccgtctcctttaatgggcggctttggacttaaacatccgcctcctcagatcctcatcaaaaacactcctgttcctgcggatcctccaacagcgttcaaccaggccaagctgaattctttcatcacgcagtacagcaccggacaagtcagcgtggagatcgagtgggagctgcagaaggagaacagcaagcgctggaacccagagattcagtatacttccaactactacaaatctacaaatgtggactttgctgttaatactgagggtgtttactctgagcctcgccccattggcactcgttacctcacccgtaatctgtaa

SEQ ID NO: 463 - protein, 738 aa, Adeno-associated virus
MAADGYLPDWLEDNLSEGIREWWDLKPGAPKPKANQQKQDDGRGLVLPGYKYLGPFNGLDKGEPVNAADAAALEHDKAYDQQLKAGDNPYLRYNHADAEFQERLQEDTSFGGNLGRAVFQAKKRVLEPLGLVEEGAKTAPGKKRPVEPSPQRSPDSSTGIGKKGQQPARKRLNFGQTGDSESVPDPQPIGEPPAAPSSVGSGTMAAGGGAPMADNNEGADGVGSSSGNWHCDSTWLGDRVITTSTRTWALPTYNNHLYKQISNGTSGGSTNDNTYFGYSTPWGYFDFNRFHCHFSPRDWQRLINNNWGFRPKRLSFKLFNIQVKEVTQNEGTKTIANSLTSTIQVFTDSEYQLPYVLGSAHQGCLPPFPADVFMIPQYGYLTPNNGSQAVGRSSFYCLEYFPSQMLRTGNNFSFSYTFEDVPFHSSYAHSQSLDRLMNPLIDQYLYYLSRTQSTGGTAGTQQLLSSQAGPSNMSAQARNWLPGPCYRQQRVSTTLSQNNNSNFAWTGATKYHLNGRDSLVNPGVAMATNKDDEDRFFPSSGILMFGKQGAGKDNVDYSNVMLTSEEEIKTTNPVATEQYGVVADNLQQQNTAPIVGAVNSQGALPGMVWQNRDVYLQGPIWAKIPHTDGNFHPSPLMGGFGLKHPPPQILIKNTPVPADPPTAFNQAKLNSFITQYSTGQVSVEIEWELQKENSKRWNPEIQYTSNYYKSTNVDFAVNTEGVYSEPRPIGTRYLTRNL

SEQ ID NO: 464 - protein, 738 aa, Adeno-associated virus
MAADGYLPDWLEDNLSEGIREWWDLKPGAPKPKANQQKQDDGRGLVLPGYKYLGPFNGLDKGEPVNAADAAALEHDKAYDQQLKAGDNPYLRYNHADAEFQERLQEDTSFGGNLGRAVFQAKKRVLEPLGLVEEGAKTAPGKKRPVEPSPQRSPDSSTGIGKKGQQPARKRLNFGQTGDSESVPDPQPIGEPPAAPSSVGSGTMAAGGGAPMADNNEGADGVGSSSGNWHCDSTWLGDRVITTSTRTWALPTYNNHLYKQISNGTSGGSTNDNTYFGYSTPWGYFDFNRFHCHFSPRDWQRLINNNWGFRPKRLSFKLFNIQVKEVTQNEGTKTIANNLTSTIQVFTDSEYQLPYVLGSAHQGCLPPFPADVFMIPQYGYLTLNNGSQAVGRSSFYCLEYFPSQMLRTGNNFSFSYTFEDVPFHSSYVHSQSLDRLMNPLIDQYLYYLSRTQSTGGTAGTQQLLFSQAGPSNMSAQARNWLPGPCYRQQRVSTTLSQNNNSNFAWTGATKYHLNGRDSLVNSGVAMATNKDDEDRFFPSSGILMFGKQGAGKDNVDYSNVMLTSEEEIKTTNPVATEQYGVVADNLQQQNTAPIVGAVNSQGALPGMVWQNRDVYLQGPIWAKIPHTDGNFHPSPLMGGFGLKHPPPQILIKNTPVPADPPTAFNQAKLNSFITQYSTGQVSVEIEWELQKENSKRWNPEIQYTSNYYKSTNVDFAVNTEGVYSEPRPIGTRYPTRNL

SEQ ID NO: 465 - DNA, 2217 bp, Adeno-associated virus
atggctgccgatggttatcttccagattggctcgaggacaacctctctgagggcattcgcgagtggtgggacctgaaacctggagccccgaaacccaaagccaaccagcaaaagcaggacgacggccggggtctggtgcttcctggctacaagtacctcggacccttcaacggactcgacaagggggagcccgtcaacgcggcggacgcagcggccctcgagcacgacaaggcctacgaccagcagctcaaagcgggtgacaatccgtacctgcggtataatcacgccgacgccgagtttcaggagcgtctgcaagaagatacgtcttttgggggcaacctcgggcgagcagtcttccaggccaagaagcgggttctcgaacctctcggtctggttgaggaaggcgctaagacggctcctggaaagaagagaccggtagagccgtcaccacagcgttcccccgactcctccacgggcatcggcaagaaaggccagcagcccgccagaaagagactcaatttcggtcagactggcgactcagagtcagtccccgaccctcaacctatcggagaacctccagcagcgccctctagtgtgggatctggtacaatggctgcaggcggtggcgcaccaatggcagacaataacgaaggtgccgacggagtgggtagttcctcgggaaattggcattgcgattccacatggctgggcgacagagtcatcaccaccagcacccgaacctgggccctgcccacctacaacaaccacctctacaagcaaatctccaacgggacctcgggaggcagcaccaacgacaacacctactttggctacagcaccccctgggggtattttgactttaacagattccactgccacttctcaccacgtgactggcagcgactcatcaacaacaactggggattccggcccaagagactcagcttcaagctcttcaacatccaggtcaaagaggtcacgcagaatgaaggcaccaagaccatcgccaataacctcaccagcaccatccaggtgtttacggactcggaataccagctgccgtacgtcctcggctctgcccaccagggctgcctgcctccgttcccggcggacgtcttcatgattcctcagtacggctacctgactctcaacaacggtagtcaggccgtgggacgttcctccttctactgcctggagtacttcccctctcagatgctgagaacgggcaacaacttttccttcagctacactttcgaggacgtgcctttccacagcagctacgtgcacagccagagtttggacaggctgatgaatcctctcatcgaccagtacctgtactacctgtcaagaacccagtctacgggaggcacagcgggaacccagcagttgctgttttctcaggccgggcctagcaacatgtcggctcaggccagaaactggctgcctggaccctgctacagacagcagcgcgtctccacgacactgtcgcaaaacaacaacagcaactttgcctggactggtgccaccaagtatcatctgaacggcagagactctctggtgaattcgggcgtcgccatggcaaccaacaaggacgacgaggaccgcttcttcccatccagcggcatcctcatgtttggcaagcagggagctggaaaagacaacgtggactatagcaacgtgatgctaaccagcgaggaagaaatcaagaccaccaaccccgtggccacagaacagtatggcgtggtggctgataacctacagcagcaaaacaccgctcctattgtgggggccgtcaacagccagggagccttacctggcatggtctggcagaaccgggacgtgtacctgcagggtcctatttgggccaagattcctcacacagatggcaactttcacccgtctcctttaatgggcggctttggacttaaacatccgcctcctcagatcctcatcaaaaacactcctgttcctgcggatcctccaacagcgttcaaccaggccaagctgaattctttcatcacgcagtacagcaccggacaagtcagcgtggagatcgagtgggagctgcagaaggagaacagcaagcgctggaacccagagattcagtatacttccaactactacaaatctacaaatgtggactttgctgttaatactgagggtgtttactctgagcctcgccccattggcactcgttaccccacccgtaatctgtaa

SEQ ID NO: 466 - protein, 734 aa, Adeno-associated virus; identical to SEQ ID NO: 291

SEQ ID NO: 467 - DNA, 2214 bp, Adeno-associated virus
atggctgctgacggttatcttccagattggctcgaggacaacctctctgagggcattcgcgagtggtgggacctgaaacctggagccccgaaacccaaagccaaccagcagaagcaggacgacggccggggtctggtgcttcctggctacaagtacctcggacccttcaacggactcgacaagggggagcccgtcaacgcggcggacgcagcggccctcgagcacgacaaggcctacgaccagcagctcaaagcgggtgacaatccgtacctgcggtataaccacgccgacgccgagtttcaggagcgtctgcaagaagatacgtcttttgggggcaacctcgggcgagcagtcttccaggccaagaagcgggttctcgaacctctcggtctggttgaggaagctgctaagacggctcctggaaagaagagaccggtagaaccgtcacctcagcgttcccccgactcctccacgggcatcggcaagaaaggccagcagcccgctagaaagagactgaactttgggcagactggcgactcagagtcagtccccgaccctcaacctctcggagaaccaccagcaggcccctctggtctgggatctggtacaatggctgcaggcggtggcgctccaatggcagacaataacgaaggcgccgacggagtgggtaatgcctcaggaaattggcattgcgattccacatggctgggcgacagagtcatcaccaccagcacccgaacctgggctttgcccacctacaacaaccacctctacaagcaaatctccagtcagtcagcaggtagcaccaacgacaacgtctacttcggctacagcaccccctgggggtattttgacttcaacagattccactgtcacttctcaccacgtgactggcagcgactcatcaacaacaactggggattccggcccaagaagctcaacttcaagctcttcaacatccaagtcaaggaggtcacgacgaatgacggcgtcacgaccatcgctaataaccttaccagcacggttcaggtcttttcggactcggagtaccagctgccgtacgtcctcggctctgcccaccagggctgcctgcctccgttcccggcggacgtcttcatgattcctcagtacggctacctgactctgaacaatggcagccaatcggtgggacgttcatccttctactgcctggaatacttcccttctcaggtgctgagaacgggtaacaacttcaccttcagttacaccttcgaggacgtgcctttccacagcagctacgcgcacagccagagcctagaccggctgatgaatcccctcatcgaccagtacctgtattacctggctagaacacagagtaacccaggaggcacatctggcaatcgggaactgcagttttaccagggcgggccttccaccatggccgaacaagccaagaactggttacctggaccttgcttccggcaacaaagagtttccaaaacactggatcaaaacaacaacagcaactttgcttggactggtgccaccaaatatcacctgaacggcagaaactcattggtgaatcctggtgtcgccatggcaactcacaaggacgacgaggaccgctttttcccatccagcggagtcctgatttttggaaaaactggagcaaccaacaagactacattggaaaacgtgttaatgacaaatgaagaagaaattcgtcctactaatcctgtggccacagaagaatacgggatagtcagcagcaatttacaagcggccaatactgcagcccagacacaagttgtcaacaaccagggagccttacctggcatggtctggcagaaccgggacgtgtacctgcagggtcccatctgggccaaaattcctcacacagacggcaactttcacccgtctccgctgatgggcggctttggactgaagcatccgcctcctcagatcctgatcaaaaacactcctgttcctgctaatcccccggaggtgtttacgcctgccaagtttgcttctttcatcacacagtacagcaccggccaggtcagcgtggagatcgagtgggagctgcagaaggagaacagcaagcgctggaacccagagattcagtatacctccaattttgacaaacagactggtgtggactttgccgttgacagccagggtgtttattctgagcctcgccccattggtactcgttacctcacccgtaatctgtaa

SEQ ID NO: 468 - protein, 737 aa, Adeno-associated virus
MAADGYLPDWLEDNLSEGIREWWDLKPGAPKPKANQQKQDDGRGLVLPGYKYLGPFNGLDKGEPVNAADAAALEHDKAYDQQLKAGDNPYLRYNHADAEFQERLQEDTSFGGNLGRAVFQAKKRVLEPLGLVEEAAKTAPGKKRPVEPSPQRSPDSSTGIGKKGQQPARKRLNFGQTGDSESVPDPQPLGEPPAGPSGLGSGTMAAGGGAPMADNNEGADGVGNASGNWHCDSTWLGDRVITTSTRTWALPTYNNHLYKQISSQSAGSTNDNVYFGYSTPWGYFDFNRFHCHFSPRDWQRLINNNWGFRPKKLNFKLFNIQVKEVTTNDGVTTIANNLTSTVQVFSDSEYQLPYVLGSAHQGCLPPFPADVFMIPQYGYLTLNNGSQSVGRSSFYCLEYFPSQVLRTGNNFTFSYTFEDVPFHSSYAHSQSLDRLMNPLIDQYLYYLARTQSNPGGTSGNRELQFYQGGPSTMAEQAKNWLPGPCFRQQRVSKTLDQNNNSNFAWTGATKYHLNGRNSLVNPGVAMATHKDDEDRFFPSSGVLIFGKTGATNKTTLENVLMTNEEEIRPTNPVATEEYGIVSSNLQAANTAAQTQVVNNQGALPGMVWQNRDVYLQGPIWAKIPHTDGNFHPSPLMGGFGLKHPPPQILIKNTPVPANPPEVFTPAKFASFITQYSTGQVSVEIEWELQKENSKRWNPEIQYTSNFDKQTGVDFAVDSQGVYSEPRPIGTRYLTRNL

SEQ ID NO: 469 - DNA, 2214 bp, Adeno-associated virus
atggctgccgatggttatcttccagattggctcgaggacaacctctctgagggcattcgcgagtggtgggacctgaaacctggagccccgaaacccaaagccaaccagcaaaagcaggacgacggccggggtctggtgcttcctggctacaagtacctcggacccttcaacggactcgacaagggggagcccgtcaacgcggcggacgcagcggccctcgagcacgacaaggcctacgaccagcagctcaaagcgggtgacaatccgtacctgcggtataatcacgccgacgccgagtttcaggagcgtctgcaagaagatacgtcttttgggggcaacctcgggcgagcagtcttccaggccaagaagcgggttctcgaacctctcggtctggttgaggaaggcgctaagacggctcctggaaagaagagaccggtagagccgtcaccacagcgttcccccgactcctccacgggcatcggcaagaaaggccagcagcccgccagaaagagactcaatttcggtcagactggcgactcagagtcagtccccgaccctcaacctatcggagaacctccagcagcgccctctagtgtgggatctggtacaatggctgcaggcggtggcgcaccaatggcagacaataacgaaggtgccgacggagtgggtagttcctcgggaaattggcattgcgattccacacggctgggcgacagagtcatcaccaccagcacccggacctgggctttgcccacctacaacaaccacctctacaagcaaatctccagtcagtcagcaggtagcaccaacgacaacgtctacttcggctacagcaccccctgggggtattttgacttcaacagattccactgtcacttctcaccacgtgactggcagcggctcatcaacaacaactggggattccggcccaagaagctcaacttcaagctgttcaacatccaggtcaaggaggtcacaacgaatgacggcgtcacgaccatcgccaataaccttaccagcacggttcaggtcttttcggactcggaataccagctgccctacgtcctcggctccgcacaccagggctgcctgcctccgttcccggcggacgtcttcatgattccccagtacggctacctgactctgaacaatggcagccaatcggtgggtcgttcctctttctactgcctggaatatttcccttctcaaatgctgagaacgggcaacaacttcaccttcagctacaccttcgaggacgttcccttccacagcagctacgcacacagccagagcctggaccggctgatgaatcctcttatcgaccagtacctgtattacctggccagaacacagagcaacgcaggaggcacagctggcaatcgggaactgcagttttatcagggcgggcctaccaccatggccgaacaagccaaaaactggctgcctggaccttgcttccggcaacgaagagtctccaagacgctggatcaaaacaacaacagcaactttgcttggactggtgccaccaaataccatctaaatggaagaaattcattggttaatcccggtgtcgccatggcaacccacaaggacgacgaggaacgcttcttcccttcgagcggagtcctgatttttggaaaaactggagcagctaataagactacactggaaaatgtgttaatgacaaatgaagaggaaattcgtcctaccaacccggtagccaccgaggaatacgggactgttagcagcaacctgcaggcggctaacactgcagcccagacacaagttgtcaacaaccagggagccttacctggtatggtctggcagaaccgggacgtgtacctgcagggtcccatctgggccaagattcctcacacggacggcaactttcacccgtctccgctgatgggcggctttggactgaagcatccgcctcctcagatcctgatcaaaaacactcctgttcctgctaatcccccggaggtgtttacgcctgccaagtttgcttctttcatcacacagtacagcaccggccaggtcagcgtggagatcgagtgggagctgcagaaggagaacagcaagcgctggaacccagagattcagtatacctccaattttgacaaacagactggtgtggactttgccgttgacagccagggtgtttattctgagcctcgccccattggtactcgttacctcacccgtaatctgtaa

SEQ ID NO: 470 - protein, 737 aa, Adeno-associated virus
MAADGYLPDWLEDNLSEGIREWWDLKPGAPKPKANQQKQDDGRGLVLPGYKYLGPFNGLDKGEPVNAADAAALEHDKAYDQQLKAGDNPYLRYNHADAEFQERLQEDTSFGGNLGRAVFQAKKRVLEPLGLVEEGAKTAPGKKRPVEPSPQRSPDSSTGIGKKGQQPARKRLNFGQTGDSESVPDPQPIGEPPAAPSSVGSGTMAAGGGAPMADNNEGADGVGSSSGNWHCDSTRLGDRVITTSTRTWALPTYNNHLYKQISSQSAGSTNDNVYFGYSTPWGYFDFNRFHCHFSPRDWQRLINNNWGFRPKKLNFKLFNIQVKEVTTNDGVTTIANNLTSTVQVFSDSEYQLPYVLGSAHQGCLPPFPADVFMIPQYGYLTLNNGSQSVGRSSFYCLEYFPSQMLRTGNNFTFSYTFEDVPFHSSYAHSQSLDRLMNPLIDQYLYYLARTQSNAGGTAGNRELQFYQGGPTTMAEQAKNWLPGPCFRQRRVSKTLDQNNNSNFAWTGATKYHLNGRNSLVNPGVAMATHKDDEERFFPSSGVLIFGKTGAANKTTLENVLMTNEEEIRPTNPVATEEYGTVSSNLQAANTAAQTQVVNNQGALPGMVWQNRDVYLQGPIWAKIPHTDGNFHPSPLMGGFGLKHPPPQILIKNTPVPANPPEVFTPAKFASFITQYSTGQVSVEIEWELQKENSKRWNPEIQYTSNFDKQTGVDFAVDSQGVYSEPRPIGTRYLTRNL

SEQ ID NO: 471 - DNA, 2208 bp, Adeno-associated virus
atggctgccgatggttatcttccagattggctcgaggacactctctctgaaggaataagacagtggtggaagctcaaacctggcccaccaccaccaaagcccgcagagcggcataaggacgacagcaggggtcttgtgcttcctgggtacaagtacctcggacccttcaacggactcgacaagggggagccggtcaacgaggcagacgccgcggccctcgagcacgacaaggcctacgaccggcagctcgacagcggagacaacccgtacctcaagtacaaccacgccgacgcggagtttcaggagcgtcttaaagaagatacgtcttttgggggcaacctcggacgagcagtcttccaggcgaaaaagagggttcttgaacctctgggcctggttgaggaacctgttaagacggctccgggaaaaaagaggccggtagagcactctcctgcggagccagactcctcctcgggaaccggaaaagcgggccagcagcctgcaagaaaaagattgaattttggtcagactggagacgcagactccgtacctgacccccagcctctcggacagccaccagcagccccctctggtttgggatctactacaatggctacaggcagtggcgcaccaatggcagacaataacgagggtgccgatggagtgggtaattcttcaggaaattggcattgcgattcccaatggctgggcgacagagtcatcaccaccagcacccgaacctgggcccagcccacctacaacaaccacctctacaagcaaatctcaagccaatcaggagcctcaaacgacaaccactactttggctacagcaccccttgggggtattttgacttcaacagattccactgccacttttcaccacgtgactggcaaagactcatcaacaacaactggggattccgacccaagagactcaacttcaagctctttaacattcaagtcaaagaggtcacgcagaatgacggtacgacgacgattgccaataaccttaccagcacggttcaggtgtttactgactcggagtaccagctcccgtacgtcctcgggtcggcgcatcaaggatgcctcccgccgtttccagcggacgtcttcatggtcccacagtatggatacctcaccctgaacaacgggagtcaggcggtaggacgctcttccttttactgcctggagtactttccttctcagatgcttcgtactggaaacaactttcagttcagctacacctttgaagacgttcctttccacagcagctacgctcacagccagagtctggatcggctgatgaatcctctgatcgaccagtacctgtattatctgaacaaaacacaatcaaatagtggagctcttcagcagtctcggctactgtttagtcaagctggacccaccagcatgtctcttcaagctaaaaactggctacctggaccttgctacagacagcagcgtctgtcaaagcaggcaaacgacaacaacaacagcaactttccctggactgcggctacaaagtaccacctaaatggccgggactcgttggttaatccaggaccagctatggccagtcacaaagacgatgaagaaaagtttttccccatgcatggaaccctgatatttggtaaacaaggaacaaatgctaacgacgcggatttggacaatgtcatgattacagatgaagaagaaatccgcaccaccaatcccgtggctacggagcagtacggatatgtgtcaaataatttgcaaaactcaaatactggtccaactactggaactgtcaatcaccgaggagcgttacctggcatggtgtggcaggatcgagacgtgtacctgcagggacccatttgggccaagattcctcacaccgatggacactttcatccttctccactgatgggaggttttgggctcaaacacccgcctcctcagatcatgatcaaaaacactcccgttccagccaatcctcccacaaacttcagttctgccaagtttgcttctttcatcacacagtattccacggggcaggtcagcgtggagatcgagtgggagctgcagaaagagaacagcaaacgctggaatcccgaaattcagtacacttccaactacaacaaatctgttaatgtggactttactgtggacactaatggcgtgtattcagagcctcgccccattggcaccagatacctgactcgtaatctgtaa

SEQ ID NO: 472 - protein, 735 aa, Adeno-associated virus
MAADGYLPDWLEDTLSEGIRQWWKLKPGPPPPKPAERHKDDSRGLVLPGYKYLGPFNGLDKGEPVNEADAAALEHDKAYDRQLDSGDNPYLKYNHADAEFQERLKEDTSFGGNLGRAVFQAKKRVLEPLGLVEEPVKTAPGKKRPVEHSPAEPDSSSGTGKAGQQPARKRLNFGQTGDADSVPDPQPLGQPPAAPSGLGSTTMATGSGAPMADNNEGADGVGNSSGNWHCDSQWLGDRVITTSTRTWAQPTYNNHLYKQISSQSGASNDNHYFGYSTPWGYFDFNRFHCHFSPRDWQRLINNNWGFRPKRLNFKLFNIQVKEVTQNDGTTTIANNLTSTVQVFTDSEYQLPYVLGSAHQGCLPPFPADVFMVPQYGYLTLNNGSQAVGRSSFYCLEYFPSQMLRTGNNFQFSYTFEDVPFHSSYAHSQSLDRLMNPLIDQYLYYLNKTQSNSGALQQSRLLFSQAGPTSMSLQAKNWLPGPCYRQQRLSKQANDNNNSNFPWTAATKYHLNGRDSLVNPGPAMASHKDDEEKFFPMHGTLIFGKQGTNANDADLDNVMITDEEEIRTTNPVATEQYGYVSNNLQNSNTGPTTGTVNHRGALPGMVWQDRDVYLQGPIWAKIPHTDGHFHPSPLMGGFGLKHPPPQIMIKNTPVPANPPTNFSSAKFASFITQYSTGQVSVEIEWELQKENSKRWNPEIQYTSNYNKSVNVDFTVDTNGVYSEPRPIGTRYLTRNL

SEQ ID NO: 473 - DNA, 2217 bp, Adeno-associated virus
atggctgccgatggttatcttccagattggctcgaggacaacctctctgagggcattcgcgagtggtgggcgctgaaacctggagccccgaagcccaaagccaaccagcaaaagcaggacgacggccggggtctggtgcttcctggctacaagtacctcggacccttcaacggactcgacaagggggagcccgtcaacgcggcggacgcagcggccctcgagcacgacaaggcctacgaccagcagctgcaggcgggtgacaatccgtacctgcggtataatcacgccgacgccgagtttcaggagcgtctgcaagaagatacgtcttttgggggcaacctcgggcgagcagtcttccaggccaagaagcgggttctcgaacctctcggtctggttgaggaaggcgctaagacggctcctggaaagaagagaccggtagagccgtcaccacagcgttcccccgactcctccacgggcatcggcaagaaaggccagcagcccgccagaaagagactcaatttcggtcagactggcgactcagagtcagtccccgaccctcaacctatcggagaacctccagcagcgccctctagtgtgggatctggtacaatggctgcaggcggtggcgcgccaatggcagacaataacgaaggtgccgacggagtgggtagttcctcgggaaattggcattgcgattccacatggctgggcgacagagtcatcaccaccagcacccgaacctgggccctgcccacctacaacaaccacctctacaagcaaacctccaacgggacctcgggaggcagcaccaacgacaacacctactttggctacagcaccccctgggggtattttgactttaacagattccactgccacttctcaccacgtgactggcagcgactcatcaacaacaactggggattccggcccaagagactcagcttcaagctcttcaacatccaggtcaaagaggtcacgcagaatgaaggcaccaagaccatcgccaataacctcaccagcaccatccaggtgtttacggactcggaataccagctgccgtacgtcctcggctctgcccaccagggctgcctgcctccgttcccggcggacgtcttcatgattcctcagtacggctacctgactctcaacaacggtagtcaggccgtgggacgttcctccttctactgcctggagtacttcccctctcagatgctgagaacgggcaacaacttttccttcagctacactttcgaggacgtgcctttccacagcagctacgcgcacagccagagtttggacaggctgatgaatcctctcatcgaccagtacctgtactacctgtcaagaacccagtctacgggaggcacagcgggaacccagcagttgctgttttctcaggccgggcctagcaacatgtcggctcaggccagaaactggctgcctggaccctgctacagacagcagcgcgtctccacgacactgtcgcaaaacaacaacagcaactttgcctggactggtgccaccaagtatcatctgaacggcagagactctctggtgaatccgggcgtcgccatggcaaccaacaaggacgacgaggaccgcttcttcccatccagcggcatcctcatgtttggcaagcagggagctggaaaagacaacgtggactatagcaacgtgatgctaaccagcgaggaagaaatcaagaccaccaaccccgtggccacagaacagtatggcgtggtggctgataacctacagcagcaaaacaccgctcctattgtgggggccgtcaacagccagggagccttacctggcatggtctggcagaaccgggacgtgtacctgcagggtcctatttgggccaagattcctcacacagatggcaactttcacccgtctcctttaatgggcggctttggacttaaacatccgcctcctcagatcctcatcaaaaacactcctgttcctgcggatcctccaacagcgttcaaccaggccaagctgaattctttcatcacgcagtacagcaccggacaagtcagcgcggagatcgagtgggagctgcagaaggagaacagcaagcgctggaacccagagattcagtatacttccaactactacaaatctacaaatgtggactttgctgttaatactgagggtgtttactctgagcctcgccccattggcactcgttacctcacccgtaatctgtaa

SEQ ID NO: 474 - protein, 738 aa, Adeno-associated virus
MAADGYLPDWLEDNLSEGIREWWALKPGAPKPKANQQKQDDGRGLVLPGYKYLGPFNGLDKGEPVNAADAAALEHDKAYDQQLQAGDNPYLRYNHADAEFQERLQEDTSFGGNLGRAVFQAKKRVLEPLGLVEEGAKTAPGKKRPVEPSPQRSPDSSTGIGKKGQQPARKRLNFGQTGDSESVPDPQPIGEPPAAPSSVGSGTMAAGGGAPMADNNEGADGVGSSSGNWHCDSTWLGDRVITTSTRTWALPTYNNHLYKQTSNGTSGGSTNDNTYFGYSTPWGYFDFNRFHCHFSPRDWQRLINNNWGFRPKRLSFKLFNIQVKEVTQNEGTKTIANNLTSTIQVFTDSEYQLPYVLGSAHQGCLPPFPADVFMIPQYGYLTLNNGSQAVGRSSFYCLEYFPSQMLRTGNNFSFSYTFEDVPFHSSYAHSQSLDRLMNPLIDQYLYYLSRTQSTGGTAGTQQLLFSQAGPSNMSAQARNWLPGPCYRQQRVSTTLSQNNNSNFAWTGATKYHLNGRDSLVNPGVAMATNKDDEDRFFPSSGILMFGKQGAGKDNVDYSNVMLTSEEEIKTTNPVATEQYGVVADNLQQQNTAPIVGAVNSQGALPGMVWQNRDVYLQGPIWAKIPHTDGNFHPSPLMGGFGLKHPPPQILIKNTPVPADPPTAFNQAKLNSFITQYSTGQVSAEIEWELQKENSKRWNPEIQYTSNYYKSTNVDFAVNTEGVYSEPRPIGTRYLTRNL

SEQ ID NO: 475 - DNA, 2217 bp, Adeno-associated virus
atggctgctgacggttatcttccagattggctcgaggacaacctctctgagggcattcgcgagtggtgggacctgaaacctggagcccccaagcccaaggccaaccagcagaagcaggacgacggccggggtctggtgcttcctggctacaagtacctcggacccttcaacggactcgacaagggggagcccgtcaacgcggcggacgcagcggccctcgagcacgacaaggcctacgaccagcagctcaaagcgggtgacaatccgtacctgcggtataatcacgccgacgccgagtttcaggagcgtctgcaagaagatacgtcttttgggggcaacctcgggcgagcagtcttccaggccaagaagcgggttctcgaacctctcggtctggttgaggaagctgctaagacggctcctggaaagaagagaccggtagaaccgtcacctcagcgttcccccgactcctccacgggcatcggcaagaaaggccagcagcccgctagaaagagactgaactttgggcagactggcgactcagagtcagtccccgaccctcaaccaatcggagaacctccagcagcgccctctagtgtgggatctggtacaatggccgcaggcggtggcgcaccaatggcagacaataacgaaggtgccgacggagtgggtagttcctcgggaaattggcattgcgattccacatggctgggcgacagagtcatcaccaccagcacccgaacctgggccctgcccacctacaacaaccacctctacaagcaaatctccaacgggacctcgggaggcagcaccaacgacaacacctactttggctacagcaccccctgggggtattttgactttaacagattccactgccacttctcaccacgtgactggcagcgactcatcaacaacaactggggattccggcccaagagactcagcttcaagctcttcaacatccaggtcaaagaggtcacgcagaatgaaggcaccaagaccatcgccaataacctcaccagcaccatccaggtgtttacggactcggaataccagctgccgtacgtcctcggctctgcccaccagggctgcctgcctccgttcccggcggacgtcttcatgattcctcagtacggctacctgactctcaacaacggtagtcaggccgtgggacgttcctccttctactgcctggagtacttcccctctcagatgctgagaacgggcaacaacttttccttcagctacactttcgaggacgtgcctttccacagcagctacgcgcacagccagagtttggacaggctgatgaatcctctcatcgaccagtacctgtactacctgtcaagaacccagtctacgggaggcacagcgggaacccagcagctgctgttttctcaggccgggcctagcaacatgtcggctcaggccagaaactggctgcctggaccctgctacagacagcagcgcgtctccacgacactgtcgcaaaacaacaacagcaactttgcctggactggtgccaccaagtatcatctgaacggcagagactctctggtgaatccgggcgtcgccatggcaaccaacaaggacgacgaggaccgcttcttcccatccagcggcatcctcatgtttggcaagcagggagctggaaaagacaacgtggactatagcaacgtgatgctaaccagcgaggaagaaatcaagaccaccaaccccgtggccacagaacagtatggcgtggtggctgataacctacagcagcaaaacaccgctcctattgtgggggccgtcaacagccagggagccttacctggcatggtctggcagaaccgggacgtgtacctgcagggtcctatttgggccaagattcctcacacagatggcaactttcacccgtctcctttaatgggcggctttggacttaaacatccgcctcctcagatcctcatcaaaagcactcctgttcctgcggatcctccaacagcgttcaaccaggccaagctgaattctttcatcacgcagtacagcaccggacaagtcagcgtggagatcgagtgggagctgcagaaggagaacagcaagtgctggaacccagagattcagtatacttccaactactacaaatctacaaatgtggactttgctgttaatactgagggtgtttactctgagcctcgccccattggcactcgttacctcacccgtaatctgtaa

SEQ ID NO: 476 - protein, 738 aa, Adeno-associated virus
MAADGYLPDWLEDNLSEGIREWWDLKPGAPKPKANQQKQDDGRGLVLPGYKYLGPFNGLDKGEPVNAADAAALEHDKAYDQQLKAGDNPYLRYNHADAEFQERLQEDTSFGGNLGRAVFQAKKRVLEPLGLVEEAAKTAPGKKRPVEPSPQRSPDSSTGIGKKGQQPARKRLNFGQTGDSESVPDPQPIGEPPAAPSSVGSGTMAAGGGAPMADNNEGADGVGSSSGNWHCDSTWLGDRVITTSTRTWALPTYNNHLYKQISNGTSGGSTNDNTYFGYSTPWGYFDFNRFHCHFSPRDWQRLINNNWGFRPKRLSFKLFNIQVKEVTQNEGTKTIANNLTSTIQVFTDSEYQLPYVLGSAHQGCLPPFPADVFMIPQYGYLTLNNGSQAVGRSSFYCLEYFPSQMLRTGNNFSFSYTFEDVPFHSSYAHSQSLDRLMNPLIDQYLYYLSRTQSTGGTAGTQQLLFSQAGPSNMSAQARNWLPGPCYRQQRVSTTLSQNNNSNFAWTGATKYHLNGRDSLVNPGVAMATNKDDEDRFFPSSGILMFGKQGAGKDNVDYSNVMLTSEEEIKTTNPVATEQYGVVADNLQQQNTAPIVGAVNSQGALPGMVWQNRDVYLQGPIWAKIPHTDGNFHPSPLMGGFGLKHPPPQILIKSTPVPADPPTAFNQAKLNSFITQYSTGQVSVEIEWELQKENSKCWNPEIQYTSNYYKSTNVDFAVNTEGVYSEPRPIGTRYLTRNL

SEQ ID NO: 477 - protein, 738 aa, Adeno-associated virus
MAADGYLPDWLEDNLSEGIREWWDLKPGAPKPKANQQKQDDGRGLVLPGYKYLGPFNGLDKGEPVNAADAAALEHDKAYDQQLKAGDNPYLRYNHADAEFQERLQEDTSFGGNLGRAVFQAKKRVLEPLGLVEEAAKTAPGKKRPVEPSPQRSPDSSTGIGKKGQQPARKRLNFGQTGDSESVPDPQPIGEPPAAPSSVGSGTMAAGGGAPMADNNEGADGVGSSSGNWHCDSTWLGDRVITTSTRTWALPTYNNHLYKQISNGTSGGSTNDNTYFGYSTPWGYFDFNRFHCHFSPRDWQRLINNNWGFRPKRLSFKLFNIQVKEVTQNEGTKTIANNLTSTIQVFTDSEYQLPYVLGSAHQGCLPPFPADVFMIPQYGYLTLNNGSQAVGRSSFYCLEYFPSQMLRTGNNFSFSYTFEDVPFHSSYAHSQSLDRLMNPLIDQYLYYLSRTQSTGGTAGTQQLLFSQAGPSNMSAQARNWLPGPCYRQQRVSTTLSQNNNSNFAWTGATKYHLNGRDSLVNPGVAMATNKDDEDRFFPSSGILMFGKQGAGKDNVDYSNVMLTSEEEIKTTNPVATEQYGVVADNLQQQNTAPIVGAVNSQGALPGMVWQNRDVYLQGPIWAKIPHTDGNFHPSPLMGGFGLKHPPPQILIKSTPVPADPPTAFNQAKLNSFITQYSTGQVSVEIEWELQKENSKRWNPEIQYTSNYYKSTNVDFAVNTEGVYSEPRPIGTRYLTRNL

SEQ ID NO: 478 - DNA, 2217 bp, Adeno-associated virus
atggctgctgacggttatcttccagattggctcgaggacaacctctctgagggcattcgcgagtggtgggacctgaaacctggagcccccaagcccaaggccaaccagcagaagcaggacgacggccggggtctggtgcttcctggctacaagtacctcggacccttcaacggactcgacaagggggagcccgtcaacgcggcggacgcagcggccctcgagcacgacaaggcctacgaccagcagctcaaagcgggtgacaatccgtacctgcggtataaccacgccgacgccgagtttcaggagcgtctgcaagaagatacgtcttttgggggcaacctcgggcgagcagtcttccaggccaagaagcgggttctcgaacctctcggtctggttgaggaagctgctaagacggctcctggaaagaagagaccggtagaaccgtcacctcagcgttcccccgactcctccacgggcatcggcaagaaaggccagcagcccgctagaaagagactgaactttgggcagactggcgactcagagtcagtccccgaccctcaaccaatcggagaaccaccagcaggcccctctggtctgggatctggtacaatggctgcaggcggtggcgcaccaatggctgacaataacgagggcgccgacggagtgggtaatgcctcaggaaattggcattgcgattccacatggctgggcgacagagtcatcaccaccagcacccgaacctgggctttgcccacctacaacaaccacctctacaagcaaatctccagtcagtcagcaggtagcaccaacgacaacgtctacttcggctacagcaccccctgggggtattttgacttcaacagattccactgtcacttctcaccacgtgactggcagcggctcatcaacaacaactggggattccggcccaagaagctcaacttcaagctgttcaacatccaggtcaaggaggtcacaacgaatgacggcgtcacgaccatcgccaataaccctaccagcacggttcaggtcttttcggactcggaataccagctgccctacgtcctcggctccgcacaccagggctgcctgcctccgttcccggcggacgtcttcatgattccccagtacggctacctgactctgaacaatggcagccaatcggtgggtcgttcctctttctactgcctggaatatttcccttctcaaatgctgagaacgggcaacaacttcaccttcagctacaccttcgaggacgttcccttccacagcagctacgcacacagccagagcctggaccggctgatgaatcctcttatcgaccagtacctgtattacctggccagaacacagagcaacgcaggaggcacagctggcaatcgggaactgcagttttatcagggcgggcctaccaccatggccgaacaagccaaaaactggctgcctggaccctgctacagacagcagcgcgtctccacgacactgtcgcaaaacaacaacagcaactttgcctggactggtgccaccaagtatcatctgaacggcagagactctctggtgaatccgggcgtcgccatggcaaccaacaaggacgacgaggaccgcttcttcccatccagcggcatcctcatgtttggcaagcagggagctggaaaagacaacgtggactatagcaacgtgatgctaaccagcgaggaagaaatcaagaccaccaaccccgtggccacagaacagtatggcgtggtggctgataacctacagcagcaaaacaccgctcctattgtgggggccgtcaacagccagggagccttacctggcatggtctggcagaaccgggacgtgtacctgcagggtcctatttgggccaagattcctcacacagatggcaactttcacccgtctcctttaatgggcggctttggacttaaacatccgcctcctcagatcctcatcaaaaacactcctgttcctgcggatcctccaacagcgttcaaccaggccaagctgaattctttcatcacgcagtacagcaccggacaagtcagcgtggagatcgagtgggagctgcagaaggagaacagcaagcgctggaacccagagattcagtatacttccaactactacaaatctacaaatgtggactttgctgttaatactgagggtgtttactctgagcctcgccccattggcactcgttacctcacccgtaatctgtaa

SEQ ID NO: 479 - protein, 738 aa, Adeno-associated virus
MAADGYLPDWLEDNLSEGIREWWDLKPGAPKPKANQQKQDDGRGLVLPGYKYLGPFNGLDKGEPVNAADAAALEHDKAYDQQLKAGDNPYLRYNHADAEFQERLQEDTSFGGNLGRAVFQAKKRVLEPLGLVEEAAKTAPGKKRPVEPSPQRSPDSSTGIGKKGQQPARKRLNFGQTGDSESVPDPQPIGEPPAGPSGLGSGTMAAGGGAPMADNNEGADGVGNASGNWHCDSTWLGDRVITTSTRTWALPTYNNHLYKQISSQSAGSTNDNVYFGYSTPWGYFDFNRFHCHFSPRDWQRLINNNWGFRPKKLNFKLFNIQVKEVTTNDGVTTIANNPTSTVQVFSDSEYQLPYVLGSAHQGCLPPFPADVFMIPQYGYLTLNNGSQSVGRSSFYCLEYFPSQMLRTGNNFTFSYTFEDVPFHSSYAHSQSLDRLMNPLIDQYLYYLARTQSNAGGTAGNRELQFYQGGPTTMAEQAKNWLPGPCYRQQRVSTTLSQNNNSNFAWTGATKYHLNGRDSLVNPGVAMATNKDDEDRFFPSSGILMFGKQGAGKDNVDYSNVMLTSEEEIKTTNPVATEQYGVVADNLQQQNTAPIVGAVNSQGALPGMVWQNRDVYLQGPIWAKIPHTDGNFHPSPLMGGFGLKHPPPQILIKNTPVPADPPTAFNQAKLNSFITQYSTGQVSVEIEWELQKENSKRWNPEIQYTSNYYKSTNVDFAVNTEGVYSEPRPIGTRYLTRNL

SEQ ID NO: 480 - DNA, 2208 bp, Adeno-associated virus
atggctgccgatggttatcttccagattggctcgaggacaacctctctgagggcattcacgagtggtgggacccgaaacctggagccccgaaacccaaagccaaccagcaaaagcaggacgacggccggggtctggtgcttcctggctacaagtacctcggacccttcaacggactcgacaagggggagcccgtcaacgcggcggacgcagcggccctcgagcacgacaaggcctacgaccagcagctcaaagcgggtgacaatccgtacctgcggtataatcacgccgacgccgagtttcaggagcgtctgcaagaagatacgtcttttgggggcaacctcgggcgagcagtcttccaggccaagaagcgggttctcgaacctctcggtctggttgaggaaggcgctaagacggctcctggaaagaagagaccggtagagccgtcaccacagcgttcccccgactcctccacgggcatcggcaagaaaggccagcagcccgccagaaagagactcaatttcggtcagactggcgactcagagtcagtccccgaccctcaacctatcggagaacctccagcagcgccctctagtgtgggatctggtacaatggctgcaggcggtggcgcaccaatggcagacaataacgaaggtgccgacggagtgggtagttcctcgggaaattggcattgcgattccacatggctgggcgacagagtcatcaccaccagcacccgaacctgggccctgcccacccacaacaaccacctctacaagcaaatctccaacgggacctcgggaggcagcaccaacgacaacgtctacttcggctacagcaccccctgggggtattttgacttcaacagattccactgtcacttctcaccacgtgaccggcagcgactcatcaacaacaactggggattccggcccaagagactcagcttcaagctcttcaacatccaggtcaaagaggtcacgcagaatgaaggcaccaagaccatcgccaataacctcaccagcaccatccaggtgtttacggactcggaataccagctgccgtacgtcctcggctctgcccaccagggctgcctgcctccgttcccggcggacgtcttcatgattcctcagtacggctacctgactctcaacaacggtagtcaggccgtgggacgttcctccttctactgcctggagtacttcccctctcagatgctgagaacgggcaacaacttttccttcagctacactttcgaggacgtgcctttccacagcagctacgcgcacagccagagtttggacaggctgatgaatcctctcatcgaccagtacctgtactacctgtcaagaacccagtctacggaaggcacagcgggaacccagcagttgctgttttctcaggccgggcctagcaacatgtcggctcaggccagaaactggctgcctggaccctgctacagacagcagcgcgtctccacgacactgtcgcaaaacaacaacagcaactttgcctggactggtgccaccaagtatcatctgaacggcagagactctctggtgaatccgggcgtcgccatggcaacccacaaggacgacgaggaacgcttcttcccttcgagcggagtcctgatttttggaaaaactggagcagctaataagactacactggaaaatgtgttaatgacaaatgaagaggaaattcgtcctaccaacccggtagccaccgaggaatacgggactgttagcagcaacctgcaggcggctaacactgcagcccagacacaagttgtcaacaaccagggagccttacctggtatggtctggcagaaccgggacgtgtacctgcagggtcccatctgggccaagattcctcacacggacggcaactttcacccgtctccgctgatgggcggctttggactgaagcatcctcagatcctgatcaaaaacactcctgttcctgctaatcccccggaggtgtttacgcctgccaagtttgcttctttcatcacacagtacagcaccggccaggtcagcgtggagatcgagtgggagctgcagaaggagaacagcaagcgctggaacccagagattcagtatacctccaattttgacaaacagactggtgtggactttgccgttgacagccagggtgtttattctgagcctcgccccattggtactcgttacctcacccgtaatctgtaa

SEQ ID NO: 481 - protein, 735 aa, Adeno-associated virus
MAADGYLPDWLEDNLSEGIHEWWDPKPGAPKPKANQQKQDDGRGLVLPGYKYLGPFNGLDKGEPVNAADAAALEHDKAYDQQLKAGDNPYLRYNHADAEFQERLQEDTSFGGNLGRAVFQAKKRVLEPLGLVEEGAKTAPGKKRPVEPSPQRSPDSSTGIGKKGQQPARKRLNFGQTGDSESVPDPQPIGEPPAAPSSVGSGTMAAGGGAPMADNNEGADGVGSSSGNWHCDSTWLGDRVITTSTRTWALPTHNNHLYKQISNGTSGGSTNDNVYFGYSTPWGYFDFNRFHCHFSPRDRQRLINNNWGFRPKRLSFKLFNIQVKEVTQNEGTKTIANNLTSTIQVFTDSEYQLPYVLGSAHQGCLPPFPADVFMIPQYGYLTLNNGSQAVGRSSFYCLEYFPSQMLRTGNNFSFSYTFEDVPFHSSYAHSQSLDRLMNPLIDQYLYYLSRTQSTEGTAGTQQLLFSQAGPSNMSAQARNWLPGPCYRQQRVSTTLSQNNNSNFAWTGATKYHLNGRDSLVNPGVAMATHKDDEERFFPSSGVLIFGKTGAANKTTLENVLMTNEEEIRPTNPVATEEYGTVSSNLQAANTAAQTQVVNNQGALPGMVWQNRDVYLQGPIWAKIPHTDGNFHPSPLMGGFGLKHPQILIKNTPVPANPPEVFTPAKFASFITQYSTGQVSVEIEWELQKENSKRWNPEIQYTSNFDKQTGVDFAVDSQGVYSEPRPIGTRYLTRNL

SEQ ID NO: 482 - protein, 738 aa, Adeno-associated virus
MAADGYLPDWLEDNLSEGIREWWDLKPGAPKPKANQQKQDDGRGLVLPGYKYLGPFNGLDKGEPVNAADAAALEHDKAYDQQLKAGDNPYLRYNHADAEFQERLQEDTSFGGNLGRAVFQAKKRVLEPLGLVEEGAKTAPGKKRPVEPSPQRSPDSSTGIGKKGQQPARKRLNFGQTGDSESVPDPQPIGEPPAAPSSVGSGTMAAGGGAPMADNNEGADGVGSSSGNWHCDSTWLGDRVITTSTRTWALPTYNNHLYKQISNGTSGGSTNDNTYFGYSTPWGYFDFNRFHCHFSPRDWQRPINNNWGFRPKRLSFKLFNIQVKEVTQNEGTKTIANNLTSTIQVFTDSEYQLPYVLGSAHQGCLPPFPADVFMIPQYGYLTLNNGSQAVGRSSFYCLEYFPSQMLRTGNNFSFSYPFEDVPFHSSYAHSQSLDRLMNPLIDQYLYYLSRTQSTGGTAGTQQLLFSQAGPSNMSAQARNWLPGPCYRQQRVSTTLSQNNNSNFAWTGATKYHLNGRDSLVNPGVAMATNKDDEDRFFPSSGILMFGKQGAGKDNVDYSNVMLTSEEEIKTTNPVATEQYGVVADNLQQQDTAPIVGAVNSQGALPGMVWQNRDVYLQGPIWAKIPHTDGNFHPSPLMGGFGLKHPPPQVLIKNTPVPADPPTAFNQAKLNSFITQYSTGQVSVEIEWELQKENSKRWNPEIQYTSNYYKSTNVDFAVNTEGVYSEPRPIGTRYLTRNL

SEQ ID NO: 483 - DNA, 2217 bp, Adeno-associated virus
atggctgccgatggttatcttccagattggctcgaggacaacctctctgagggcattcgcgagtggtgggacctgaaacctggagccccgaaacccaaggccaaccagcaaaagcaggacgacggccggggtctggtgcttcctggctacaagtacctcggacccttcaacggactcgacaagggggagcccgtcaacgcggcggacgcagcggccctcgagcacgacaaggcctacgaccagcagctcaaagcgggtgacaatccgtacctgcggtataatcacgccgacgccgagtttcaggagcgtctgcaagaagatacgtcttttgggggcaacctcgggcgagcagtcttccaggccaagaagcgggttctcgaacctctcggtctggttgaggaaggcgctaagacggctcctggaaagaagagaccggtagagccgtcaccacagcgttcccccgactcctccacgggcatcggcaagaaaggccagcagcccgccagaaagagactcaatttcggtcagactggcgactcagagtcagtccccgaccctcaacctatcggagaacctccagcagcgccctctagtgtgggatctggtacaatggctgcaggcggtggcgcaccaatggcagacaataacgaaggtgccgacggagtgggtagttcctcgggaaattggcattgcgattccacatggctgggcgacagagtcatcaccaccagcacccgaacctgggccctgcccacctacaacaaccacctctacaagcaaatctccaacgggacctcgggaggcagcaccaacgacaacacctactttggctacagcaccccctgggggtattttgactttaacagattccactgccacttctcaccacgtgactggcagcgacccatcaacaacaactggggattccggcccaagagactcagcttcaagctcttcaacatccaggtcaaagaggtcacgcagaatgaaggcaccaagaccatcgccaataacctcaccagcaccatccaggtgtttacggactcggaataccagctgccgtacgtcctcggctctgcccaccagggctgcctgcctccgttcccggcggacgtcttcatgattcctcagtacggctacctgactctcaacaacggtagtcaggccgtgggacgttcctccttctactgcctggagtacttcccctctcagatgctgagaacgggcaacaacttttccttcagctaccctttcgaggacgtgcctttccacagcagctacgcgcacagccagagtttggacaggctgatgaatcctctcatcgaccagtacctgtactacctgtcaagaacccagtctacgggaggcacagcgggaacccagcagttgctgttttctcaggccgggcctagcaacatgtcggctcaggccagaaactggctgcctggaccctgctacagacagcagcgcgtctccacgacactgtcgcaaaacaacaacagcaactttgcctggactggtgccaccaagtatcatctgaacggcagagactctctggtgaatccgggcgtcgccatggcaaccaacaaggacgacgaggaccgcttcttcccatccagcggcatcctcatgtttggcaagcagggagctggaaaagacaacgtggactatagcaacgtgatgctaaccagcgaggaagaaatcaagaccaccaaccccgtggccacagaacagtatggcgtggtggctgataacctacagcagcaagacaccgctcctattgtgggggccgtcaacagccagggagccttacctggcatggtctggcagaaccgggacgtgtacctgcagggtcctatttgggccaagattcctcacacagatggcaactttcacccgtctcctttaatgggcggctttggacttaaacatccgcctcctcaggtcctcatcaaaaacactcctgttcctgcggatcctccaacagcgttcaaccaggccaagctgaattctttcatcacgcagtacagcaccggacaagtcagcgtggagatcgagtgggagctgcagaaggagaacagcaagcgctggaacccagagattcagtatacttccaactactacaaatctacaaatgtggactttgctgttaatactgagggtgtttactctgagcctcgccccattggcactcgttacctcacccgtaatctgtaa

SEQ ID NO: 484 - DNA, 2214 bp, Adeno-associated virus
atggctgctgacggttatcttccagattggctcgaggacaacctctctgagggcattcgcgagtggtgggacctgaaacctggagcccccaagcccaaggccaaccagcagaagcaggacgacggccggggtctggtgcttcctggctacaagtacctcggacccttcaacggactcgacaagggggagcccgtcaacgcggcggacgcagcggccctcgagcacgacaaggcctacgaccagcagctcaaagcgggtgacaatccgtacctgcggtataaccacgccgacgccgagttccaggagcgtctgcaagaagatacgtcttttgggggcaacctcgggcgagcagtcttccaggccaagaagcgggttctcgaacctctcggtctggctgaggaagctgctaagacggctcctggaaagaagagaccggtagaaccgtcacctcagcgttcccccgactcctccacgggcatcggcaagaaaggccagcagcccgctagaaagagactgaactttgggcagactggcgactcagagtcagtccccgaccctcaaccaatcggagagccaccagcaggcccctctggtctgggatctggtacaatggctgcaggcggtggcgcaccaatggctgacaataacaagggcgccgacggagtgggtaatgcctcaggaaattggcattgcgattccacatggctgggcgacagagtcatcaccaccagcacccgaacctgggctttgcccacctacaacaaccacctctacaagcaaatctccagtcagtcagcaggtagcaccaacgacaacgtctacttcggctacagcaccccctgggggtattttgacttcaacagattccactgtcacttctcaccacgtgactggcagcggctcatcaacaacaactggggattccggcccaagaagctcaacttcaagctgttcaacatccaggtcaaggaggtcacaacgggtgacggcgtcacgaccatcgccaataaccttaccagcacggttcaggtcttttcggactcggaataccagctgccctacgtcctcggctccgcacaccagggctgcctgcctccgttcccggcggacgtcttcatgattccccagtacggctacctgactctgaacaatgacagccaatcggtgggtcgttcctctttctactgcctggaatatttcccttctcaaatgctgagaacgggcaacaacttcaccttcagctacaccttcgaggacgttcccttccacagcagctacgcacacagccagagcctggaccggctgatgaatcctcttatcgaccagtacctgtattacctggccagaacacagagcaacgcaggaggcacagctggcaatcgggaactgcagttttatcagggcgggcctaccaccatggccgaacaagccaaaaactggctgcctggaccttgcttccggcaacaaagagtctccaagacgctggatcaaaacaacaacagcaactttgcttggactggtgccaccaaataccatctaaatggaagaaattcattggttaatcccggtgtcgccatggcaacccacaaggacgacgaggaacgcttcttcccttcgagcggagtcctgatttttggaaaaactggagcagctaataagactacactggaaaatgtgttaatgacaaatgaagaggaaattcgtcctaccaacccggtagccaccgaggaatacgggactgttagcagcaacctgcaggcggctaacactgcagcccagacacaagttgtcaacaaccagggagccttacctggtatggtctggcagaaccgggacgtgtacctgcagggtcccatctgggccaagattcctcacacggacggcaactttcacccgtctccgctgatgggcggctttggactgaagcatccgcctcctcagatcctgatcaaaaacactcctgttcctgctaatcccccggaggtgtttacgcctgccaagtttgcttctttcatcacacagtacagcaccggccaggtcagcgtggagatcgagtgggagctgcagaaggagaacagcaagcgctggaacccagagattcagtatacctccaattttgacaaacagactggtgtggactttgccgttgacagccagggtgtttattctgagcctcgccccattggtactcgttacctcacccgtaatctgtaa

SEQ ID NO: 485 - protein, 737 aa, Adeno-associated virus
MAADGYLPDWLEDNLSEGIREWWDLKPGAPKPKANQQKQDDGRGLVLPGYKYLGPFNGLDKGEPVNAADAAALEHDKAYDQQLKAGDNPYLRYNHADAEFQERLQEDTSFGGNLGRAVFQAKKRVLEPLGLAEEAAKTAPGKKRPVEPSPQRSPDSSTGIGKKGQQPARKRLNFGQTGDSESVPDPQPIGEPPAGPSGLGSGTMAAGGGAPMADNNKGADGVGNASGNWHCDSTWLGDRVITTSTRTWALPTYNNHLYKQISSQSAGSTNDNVYFGYSTPWGYFDFNRFHCHFSPRDWQRLINNNWGFRPKKLNFKLFNIQVKEVTTGDGVTTIANNLTSTVQVFSDSEYQLPYVLGSAHQGCLPPFPADVFMIPQYGYLTLNNDSQSVGRSSFYCLEYFPSQMLRTGNNFTFSYTFEDVPFHSSYAHSQSLDRLMNPLIDQYLYYLARTQSNAGGTAGNRELQFYQGGPTTMAEQAKNWLPGPCFRQQRVSKTLDQNNNSNFAWTGATKYHLNGRNSLVNPGVAMATHKDDEERFFPSSGVLIFGKTGAANKTTLENVLMTNEEEIRPTNPVATEEYGTVSSNLQAANTAAQTQVVNNQGALPGMVWQNRDVYLQGPIWAKIPHTDGNFHPSPLMGGFGLKHPPPQILIKNTPVPANPPEVFTPAKFASFITQYSTGQVSVEIEWELQKENSKRWNPEIQYTSNFDKQTGVDFAVDSQGVYSEPRPIGTRYLTRNL

SEQ ID NO: 486 - DNA, 2217 bp, Adeno-associated virus
atggctgccgatggttatcttccagattggctcgaggacaacctctctgagggcattcgcgagtggtgggacctgaaacctggagccccgaaacccaaagccaaccagcaaaagcaggacgacggccggggtctggtgcttcctggctacaagtacctcggacccttcaacggactcgacaagggggagcccgtcaacgcggcggacgcagcggccctcgagcacgacaaggcctacgaccagcagctcaaagcgggtgacaatccgtacctgcggtataatcacgccgacgccgagtttcaggagcgtctgcaagaagatacgtcttttgggggcaacctcgggcgagcagtcttccaggccaagaagcgggttctcgaacctctcggtctggttgaggaaggcgctaagacggctcctggaaagaagagaccggtagagccgtcaccacagcgttcccccgactcctccacgggcatcggcaagaaaggccagcagcccgccagaaagagactcaatttcggtcagactggcgactcagagtcagtccccgaccctcaacctatcggagaacctccagcagcgccctctagtgtgggatctggtacaatggctgcaggcggtggcgcaccaatggcagacaataacgaaggtgccgacggagtgggtagttcctcgggaaattggcattgcgattccacatggctgggcgacagagtcatcaccaccagcacccgaacctgggccctgcccacctacaacaaccacctctacaagcaaatctccaacgggacctcgggaggcagcaccaacgacaacacctactttggctacagcaccccctgggggtattttgactttaacagattccactgccacttctcaccacgtgactggcagcgactcatcaacaacaactggggattccggcccaagagactcagcttcaagctcttcaacatccaggtcaaagaggtcacgcagaatgaaggcaccaagaccatcgccaataacctcaccagcaccatccaggtgtttacggactcggaataccagctgccgtacgtcctcggctctgcccaccagggctgcctgcctccgttcccggcggacgtcttcatgattcctcagtacggctacctgactctcaacaacggtagtcaggccgtgggacgttcctccttctactgcctggagtacttcccctctcagatgctgagaacgggcaacaacttttccttcagctacactttcgaggacgtgcctttccacagcagctacgcgcacagccagagtttggacaggctgatgaatcctctcatcgaccagtacctgtactacctgtcaagaacccagtctacgggaggcacagcgggaacccagcagttgctgttttctcaggccgggcctagcaacatgtcggctcaggccagaaactggctgcctggaccctgctacagacagcagcgcgtctccacgacactgtcgcaaaacaacaacagcaactttgcctggactggtgccaccaagtatcatctgaacggcagagactctctggtgaatccgggcgtcgccatggcaaccaacaaggacgacgaggaccgcttcttcccatccagcggcatcctcatgtttggcaagcagggagctggaaaagacaacgtggactatagcaacgtgatgctaaccagcgaggaagaaatcaagaccaccaaccccgtggccacagaacagtatggcgtggtggctgataacctacagcagcaaaacaccgctcctattgtgggggccgtcaacagccagggagccttacctggcatggtctggcagaaccgggacgtgtacctgcagggtcctatttgggccaagattcctcacacagatggcaactttcacccgtctcctttaatgggcggctttggacttaaacatccgcctcctcagatcctcatcaaaaacactcctgttcctgcggatcctccaacagcgttcaaccaggccaagctgaattctttcatcacgcagtacagcaccggacaagtcagcgtggagatcgtgtgggagctgcagaaggagaacagcaagcgcaggaacccagagattcagtatacttccaactactacaaatctacaaatgtggactttgctgttaatactgagggtgtttactctgagcctcgccccattggcactcgttacctcacccgtaatctgtaa

SEQ ID NO: 487 - protein, 738 aa, Adeno-associated virus
MAADGYLPDWLEDNLSEGIREWWDLKPGAPKPKANQQKQDDGRGLVLPGYKYLGPFNGLDKGEPVNAADAAALEHDKAYDQQLKAGDNPYLRYNHADAEFQERLQEDTSFGGNLGRAVFQAKKRVLEPLGLVEEGAKTAPGKKRPVEPSPQRSPDSSTGIGKKGQQPARKRLNFGQTGDSESVPDPQPIGEPPAAPSSVGSGTMAAGGGAPMADNNEGADGVGSSSGNWHCDSTWLGDRVITTSTRTWALPTYNNHLYKQISNGTSGGSTNDNTYFGYSTPWGYFDFNRFHCHFSPRDWQRLINNNWGFRPKRLSFKLFNIQVKEVTQNEGTKTIANNLTSTIQVFTDSEYQLPYVLGSAHQGCLPPFPADVFMIPQYGYLTLNNGSQAVGRSSFYCLEYFPSQMLRTGNNFSFSYTFEDVPFHSSYAHSQSLDRLMNPLIDQYLYYLSRTQSTGGTAGTQQLLFSQAGPSNMSAQARNWLPGPCYRQQRVSTTLSQNNNSNFAWTGATKYHLNGRDSLVNPGVAMATNKDDEDRFFPSSGILMFGKQGAGKDNVDYSNVMLTSEEEIKTTNPVATEQYGVVADNLQQQNTAPIVGAVNSQGALPGMVWQNRDVYLQGPIWAKIPHTDGNFHPSPLMGGFGLKHPPPQILIKNTPVPADPPTAFNQAKLNSFITQYSTGQVSVEIVWELQKENSKRRNPEIQYTSNYYKSTNVDFAVNTEGVYSEPRPIGTRYLTRNL

SEQ ID NO: 488 - protein, 738 aa, Adeno-associated virus
MAADGYLPDWLEDNLSEGIREWWDLKPGAPKPKANQQKQDDGRGLVLPGYKYLGPFNGLDKGEPVNAADAAALEHDKAYDQQLKAGDNPYLRYNHADAEFQERLQEDTSFGGNLGRAVFQAKKRVLEPLGLVEEGAKTAPGKKRPVEPSPQRSPDSSTGIGKKGQQPARKRLNFGQTGDSESVPDPQPIGEPPAAPSSVGSGTMAAGGGAPMADNNEGADGVGSSSGNWHCDSTWLGDRVITTSTRTWALPTYNNHLYKQISNGTSGGSTNDNTYFGYSTPWGYFDFNRFHCHFSPRDWQRLINNNWGFRPKRLSFKLFNIQVKEVTQNEGTKTIANNLTSTIQVFTDSEYQLPYVLGSAHQGCLPPFPADVFMIPQYGYLTLNNGSQAVGRSSFYCLEYFPSQMLRTGNNFSFSYTFEDVPFHSSYAHSQSLDRLMNPLIDQYLYYLSRTQSTGGTAGTQQLLFSQAGPSNMSAQARNWLPGPCYRQQRVSTTLSQNNNSNFAWTGATKYHLNGRDSLVNPGVAMATNKDDEDRFFPSSGILMFGKQGAGKDNVDYSNVMLTSEEEIKTTNPVATEQYGVVADNLQQQNTAPIVGAVNSQGALPGMVWQNRDVYLQGPIWAKIPHTDGNFHPSPLMGGFGLKHPPPQILIKNTPVPADPPTAFNQAKLNSFITQYSTGQVSVEIEWELQKENSKRWNPEIQYTSNYYKSTNVDFAVNTEGVYSEPRPIGTRYLTRNL

SEQ ID NO: 489 - protein, 738 aa, Adeno-associated virus
MAADGYLPDWLEDNLSEGIREWWDLKPGAPKPKANQQKQDDGRGLVLPGYKYLGPFNGLDKGEPVNAADAAALEHDKAYDQQLKAGDNPYLRYNHADAEFQERLQEDTSFGGNLGRAVFQAKKRVLEPLGLVEEGAKTAPGKKRPVEPSPQRSPDSSTGIGKKGQQPARKRLNFGQTGDSESVPDPQPIGEPPAAPSSVGSGTMAAGGGAPMADNNEGADGVGSSSGNWHCDSTWLGDRVITTSTRTWALPTYNNHLYKQISNGTSGGSTNDNTYFGYSTPWGYFDFNRFHCHFSPRDWQRLINNNWGFRPKRLSFKLFNIQVKEVTQNEGTKTIANNLTSTIQVFTDSEYQLPYVLGSAHQGCLPPFPADVFMIPQYGYLTLNNGSQAVGRSSFYCLEYFPSQMLRTGNNFSFSYTFEDVPFHSSYAHSQSLDRLMNPLIDQYLYYLSRTQSTGGTAGTQQLLFSQAGPSNMSAQARNWLPGPCYRQQRVSTTLSQNNNSNFAWTGATKYHLNGRDSLVNPGVAMATNKDDEDRFFPSSGILMFGKQGAGKDNVDYSNVMLTSEEEIKTTNPVATEQYGVVADNLQQQNTAPIVGAVNSQGALPGMVWQNRDVYLQGPIWAKIPHTDGNFHPSPLMGGFGLKHPPPQILIKNTPVPADPPTAFNQAKLNSFITQYSTGQVSVEIVWELQKENSKRWNPEIQYTSNYYKSTNVDFAVNTEGVYSEPRPIGTRYLTRNL

SEQ ID NO: 490 - protein, 738 aa, Adeno-associated virus; identical to SEQ ID NO: 488

SEQ ID NO: 491 - DNA, 2214 bp, Adeno-associated virus
atggctgctgacggttatcttccagattggctcgaggacaacctctctgagggcattcgcgagtggtgggacctgaaacctggagcccccaagcccaaggccaaccagcagaagcaggacgacggccggggtctggtgcttcctggctacaagtacctcggacccttcaacggactcgacaagggggagcccgtcaacgcggcggacgcagcggccctcgagcacgacaaggcctacgaccagcagctcaaagcgggtgacaatccgtacctgcggtataaccacgccgacgccgagtttcaggagcgtctgcaagaagatacgtcttttgggggcaacctcgggcgagcagtcttccaggccaagaagcgggttctcgaacctctcggtctggttgaggaagctgctaagacggctcctggaaagaagagaccggtagaaccgtcacctcagcgttcccccgactcctccacgggcatcggcaagaaaggccagcagcccgctagaaagagactgaactttgggcagactggcgactcagagtcagtccccgaccctcaaccaatcggagaaccaccagcaggcccctctggtctgggatctggtacaatggctgcaggcggtggcgctccaatggcagacaataacgaaggcgccgacggagtgggtaatgcctcaggaaattggcattgcgattccacatggctgggcgacagagtcatcaccaccagcacccgaacctgggctttgcccacctacaacaaccacctctacaagcaaatctccagtcagtcagcaggtagcaccaacgacaacgtctacttcggctacagcaccccctgggggtattttgacttcaacagattccactgtcacttctcaccacgtgactggcagcggctcatcaacaacaactggggattccggcccaagaagctcaacttcaagctgttcaacatccaggtcaaggaggtcacaacgaatgacggcgtcacgaccatcgccaataaccttaccagcacggttcaggtcttttcggactcggaataccagctgccctacgtcctcggctccgcacaccagggctgcctgcctccgttcccggcggacgtcttcatgattccccagtacggctacctgactctgaacaatggcagccaatcggtgggtcgttcctctttctactgcctggaatatttcccttctcaaatgctgagaacgggcaacaacttcaccttcagctacaccttcgaggacgttcccttccacagcagctacgcacacagccagagcctggaccggctgatgaatcctcttatcgaccagtacctgtattacctggccagaacacagagcaacgcaggaggcacagctggcaatcgggaactgcagttttatcagggcgggcctaccaccatggccgaacaagccaaaaactggctgcctagaccttgcttccggcaacaaagagtctccaagacgctggatcaaaacaacaacagcaactttgcttggactggtgccaccaaataccatctaaatggaagaaattcattggttaatcccggtgtcgccatggcaacccacaaggacgacgaggaacgcttcttcccttcgagcggagtcctgatttttggaaaaactggagcagctaataagactacactggaaaatgtgttaatgacaaatgaagaggaaattcgtcctaccaacccggtagccaccgaggaatacgggactgttagcagcaacctgcaggcggctaacactgcagcccagacacaagttgtcaacaaccagggagccttacctggtatggtctggcagaaccgggacgtgtacctgcagggtcccatctgggccaagattcctcacacggacggcaactttcacccgtctccgctgatgggcggctttggactgaagcatccgcctcctcagatcctgatcaaaaacactcctgttcctgctaatcccccggaggtgtttacgcctgccaagtttgcttctttcatcacacagtacagcaccggccaggtcagcgtggagatcgagtgggagctgcagaaggagaacagcaagcgctggaacccagagattcagtatacctccaattttgacaaacagactggtgtggactttgccgttgacagccagggtgtttattctgagcctcgccccattggtactcgttacctcacccgtaatctgtaa

SEQ ID NO: 492 - protein, 737 aa, Adeno-associated virus
MAADGYLPDWLEDNLSEGIREWWDLKPGAPKPKANQQKQDDGRGLVLPGYKYLGPFNGLDKGEPVNAADAAALEHDKAYDQQLKAGDNPYLRYNHADAEFQERLQEDTSFGGNLGRAVFQAKKRVLEPLGLVEEAAKTAPGKKRPVEPSPQRSPDSSTGIGKKGQQPARKRLNFGQTGDSESVPDPQPIGEPPAGPSGLGSGTMAAGGGAPMADNNEGADGVGNASGNWHCDSTWLGDRVITTSTRTWALPTYNNHLYKQISSQSAGSTNDNVYFGYSTPWGYFDFNRFHCHFSPRDWQRLINNNWGFRPKKLNFKLFNIQVKEVTTNDGVTTIANNLTSTVQVFSDSEYQLPYVLGSAHQGCLPPFPADVFMIPQYGYLTLNNGSQSVGRSSFYCLEYFPSQMLRTGNNFTFSYTFEDVPFHSSYAHSQSLDRLMNPLIDQYLYYLARTQSNAGGTAGNRELQFYQGGPTTMAEQAKNWLPRPCFRQQRVSKTLDQNNNSNFAWTGATKYHLNGRNSLVNPGVAMATHKDDEERFFPSSGVLIFGKTGAANKTTLENVLMTNEEEIRPTNPVATEEYGTVSSNLQAANTAAQTQVVNNQGALPGMVWQNRDVYLQGPIWAKIPHTDGNFHPSPLMGGFGLKHPPPQILIKNTPVPANPPEVFTPAKFASFITQYSTGQVSVEIEWELQKENSKRWNPEIQYTSNFDKQTGVDFAVDSQGVYSEPRPIGTRYLTRNL

SEQ ID NO: 493 - DNA, 2214 bp, Adeno-associated virus
atggctgctgacggttatcttccagattggctcgaggacaacctctctgagggcattcgcgagtggtgggacctgaaacctggagcccccaagcccaaggccaaccagcagaagcaggacgacggccggggtctggtgcttcctggctacaagtacctcggacccttcaacggactcgacaagggggagcccgtcaacgcggcggacgcagcggccctcgagcacgacaaggcctacgaccagcagctcaaagcgggtgacaatccgtacctgcggtataaccatgccgacgccgagtttcaggagcgtctgcaagaagatacgtcttttgggggcaacctcgggcgagcagtcctccaggccaagaagcgggttctcgaacctctcggtctggttgaggaagctgctaagacggctcctggaaagaagagaccggtagaaccgtcacctcagcgttcccccgactcctccacgggcatcggcaagaaaggccagcagcccgctagaaagagactgaactttgggcagactggcgactcagagtcagtccccgaccctcaaccaatcggagaaccaccagcaggcccctctggtctgggatctggtacaatggctgcaggcggtggcgctccaatggcagacaataacgaaggcgccgacggagtgggtaatgcctcaggaaattggcattgcgattccacatggctgggcgacagagtcatcaccaccagcacccgaacctgggctttgcccacctacaacaaccacctctacaagcaaatctccagtcagtcagcaggtagcaccaacgacaacgtctacttcggctacagcaccccctgggggtattttgacttcaacagattccactgtcacttctcaccacgtgactggcagcggctcatcaacaacaactggggattccggcccaagaagctcaacttcaagctgttcaacatccaggtcaaggaggtcacaacgaatgacggcgtcacgaccatcgccaataaccttaccagcacggttcaggtcttttcggactcggaataccagctgccctacgtcctcggctccgcacaccagggctgcctgcctccgttcccggcggacgtcttcatgattccccagtacggctacctgactctgaacaatggcagccaatcggtgggtcgttcctctttctactgcctggaatatttcccttctcaaatgctgagaacgggcaacaacttcaccttcagctacaccttcgaggacgttcccttccacagcagctacgcacacagccagagcctggaccggctgatgaatcctcttatcgaccagtacctgtattacctggccagaacacagagcaacgcaggaggcacagctggcaatcgggaactgcagttttatcagggcgggcctaccaccatggccgaacaagccaaaaactggctgcctggaccttgcttccggcaacaaagagtctccaagacgctggatcaaaacaacaacagcaactttgcttggactggtgccaccaaataccatctaaatggaagaaattcattggttaatcccggtgtcgccatggcaacccacaaggacgacgaggaacgcttcttcccttcgagcggagtcctgatttttggaaaaactggagcagctaataagactacactggaaaatgtgttaatgacaaatgaagaggaaattcgtcctaccaacccggtagccaccgaggaatacgggactgttagcagcaacctgcaggcggctaacactgcagcccagacacaagttgtcaacaaccagggagccttacctggtatggtctggcagaaccgggacgtgtacctgcagggtcccatctgggccaagattcctcacacggacggcaactttcacccgtctccgctgatgggcggctttggactgaagcatccgcctcctcagatcctgatcaaaaacactcctgttcctgctaatcccccggaggtgtttacgcctgccaagtttgcttctttcatcacacagtacagcaccggccaggtcagcgtggagatcgagtgggagctgcagaaggagaacagcaagcgctggaacccagagattcagtatacctccaattttgacaaacagactggtgtggactttgccgttgacagccagggtgtttattctgagcctcgccccattggtactcgttacctcacccgtaatctgtaa

SEQ ID NO: 494 - protein, 737 aa, Adeno-associated virus; identical to SEQ ID NO: 453

SEQ ID NO: 495 - protein, 737 aa, Adeno-associated virus
MAADGYLPDWLEDNLSEGIREWWDLKPGAPKPKANQQKQDDGRGLVLPGYKYLGPFNGLDKGEPVNAADAAALEHDKAYDQQLKAGDNPYLRYNHADAEFQERLQEDTSFGGNLGRAVLQAKKRVLEPLGLVEEAAKTAPGKKRPVEPSPQRSPDSSTGIGKKGQQPARKRLNFGQTGDSESVPDPQPIGEPPAGPSGLGSGTMAAGGGAPMADNNEGADGVGNASGNWHCDSTWLGDRVITTSTRTWALPTYNNHLYKQISSQSAGSTNDNVYFGYSTPWGYFDFNRFHCHFSPRDWQRLINNNWGFRPKKLNFKLFNIQVKEVTTNDGVTTIANNLTSTVQVFSDSEYQLPYVLGSAHQGCLPPFPADVFMIPQYGYLTLNNGSQSVGRSSFYCLEYFPSQMLRTGNNFTFSYTFEDVPFHSSYAHSQSLDRLMNPLIDQYLYYLARTQSNAGGTAGNRELQFYQGGPTTMAEQAKNWLPGPCFRQQRVSKTLDQNNNSNFAWTGATKYHLNGRNSLVNPGVAMATHKDDEERFFPSSGVLIFGKTGAANKTTLENVLMTNEEEIRPTNPVATEEYGTVSSNLQAANTAAQTQVVNNQGALPGMVWQNRDVYLQGPIWAKIPHTDGNFHPSPLMGGFGLKHPPPQILIKNTPVPANPPEVFTPAKFASFITQYSTGQVSVEIEWELQKENSKRWNPEIQYTSNFDKQTGVDFAVDSQGVYSEPRPIGTRYLTRNL

SEQ ID NO: 496 - DNA, 2217 bp, Adeno-associated virus
atggctgccgatggttatcttccagattggctcgaggacaacctctctgagggcattcgcgagtggtgggacctgaaacctggagccccgaaacccaaagccaaccagcaaaagcaggacgacggccggggtctggtgcttcctggctacaagtacctcggacccttcaacggactcgacaagggggagcccgtcaacgcggcggacgcagcggccctcgagcacgacaaggcctacgaccagcagctcaaagcgggtgacaatccgtacctgcggtataatcacgccgacgccgagtttcaggagcgtctgcaagaagatacgtcttttgggggcaacctcgggcgagcagtcttccaggccaagaagcgggttctcgaacctctcggtctggttgaggaaggcgctaagacggctcctggaaagaagagaccggtagagccgtcaccacagcgttcccccgactcctccacgggcatcggcaagaaaggccagcagcccgccagaaagagactcaatttcggtcagactggcgactcagagtcagtccccgaccctcaacctatcggagaacctccagcagcgccctctagtgtgggatctggtacaatggctgcaggcggtggcgcaccaatggcagacaataacgaaggtgccgacggagtgggtagttcctcgggaaattggcattgcgattccacatggctgggcgacagagtcatcaccaccagcacccgaacctgggccctgcccacctacaacaaccacctctacaagcaaatctccaacgggacctcgggaggcagcaccaacgacaacacctactttggctacagcaccccctgggggtattttgactttaacagattccactgccacttctcaccacgtgactggcagcgactcatcaacaacaactggggattccggcccaagagactcagcttcaagctcttcaacatccaggtcaaagaggtcacgcagaatgaaggcaccaagaccatcgccaataacctcaccagcaccatccaggtgtttacggactcggaataccagctgccgtacgtcctcggctctgcccaccagggctgcctgcctccgttcccggcggacgtcttcatgattcctcagtacggctacctgactctcaacaacggtagtcaggccgtgggacgttcctccttctactgcctggagtacttcccctctcagatgctgagaacgggcaacaacttttccttcagctacactttcgaggacgtgcctttccacagcagctacgcgcacagccagagtttggacaggctgatgaatcctctcatcgaccagtacctgtactacctgtcaagaacccagtctacgggaggcacagcgggaacccagcagttgctgttttctcaggccgggcctagcaacatgtcggctcaggccagaaactggctgcctggaccctgctacagacagcagcgcgtctccacgacactgtcgcaaaacaacaacagcaactttgcctggactggtgccaccaagtatcatctgaacggcagagactctctggtgaatccgggcgtcgccatggcaaccaacaaggacgacgaggaccgcttcttcccacccagcggcatcctcatgtttggcaagcagggagctggaaaagacaacgtggactatagcaacgtgatgctaaccagcgaggaagaaatcaagaccaccaaccccgtggccacagaacagtatggcgtggtggctgataacctacagcagcaaaacaccgctcctattgtgggggccgtcaacagccagggagccttacctggcatggtctggcagaaccgggacgtgtacctgcagggtcctatttgggccaagattcctcacacagatggcaactttcacccgtctcctttaatgggcggctttggacttaaacatccgcctcctcagatcctcatcaaaaacactcctgttcctgcggatcctccaacagcgttcaaccaggccaagctgaattctttcatcacgcagtacagcaccggacaagtcagcgtggtgatcgagtgggagctgcagaaggagaacagcaagcgctggaacccagagattcagtatacttccaactactacaaatctacaaatgtggactttgctgttaatactgagggtgtttactctgagcttcgccccattggcactcgttacctcacccgtaatctgtaa

SEQ ID NO: 497 - protein, 738 aa, Adeno-associated virus
MAADGYLPDWLEDNLSEGIREWWDLKPGAPKPKANQQKQDDGRGLVLPGYKYLGPFNGLDKGEPVNAADAAALEHDKAYDQQLKAGDNPYLRYNHADAEFQERLQEDTSFGGNLGRAVFQAKKRVLEPLGLVEEGAKTAPGKKRPVEPSPQRSPDSSTGIGKKGQQPARKRLNFGQTGDSESVPDPQPIGEPPAAPSSVGSGTMAAGGGAPMADNNEGADGVGSSSGNWHCDSTWLGDRVITTSTRTWALPTYNNHLYKQISNGTSGGSTNDNTYFGYSTPWGYFDFNRFHCHFSPRDWQRLINNNWGFRPKRLSFKLFNIQVKEVTQNEGTKTIANNLTSTIQVFTDSEYQLPYVLGSAHQGCLPPFPADVFMIPQYGYLTLNNGSQAVGRSSFYCLEYFPSQMLRTGNNFSFSYTFEDVPFHSSYAHSQSLDRLMNPLIDQYLYYLSRTQSTGGTAGTQQLLFSQAGPSNMSAQARNWLPGPCYRQQRVSTTLSQNNNSNFAWTGATKYHLNGRDSLVNPGVAMATNKDDEDRFFPPSGILMFGKQGAGKDNVDYSNVMLTSEEEIKTTNPVATEQYGVVADNLQQQNTAPIVGAVNSQGALPGMVWQNRDVYLQGPIWAKIPHTDGNFHPSPLMGGFGLKHPPPQILIKNTPVPADPPTAFNQAKLNSFITQYSTGQVSVVIEWELQKENSKRWNPEIQYTSNYYKSTNVDFAVNTEGVYSELRPIGTRYLTRNL

SEQ ID NO: 498 - DNA, 2214 bp, Adeno-associated virus
atggctgctgacggttatcttccagattggctcgaggacaacctctctgagggcattcgcgagtggtgggacctgaaacctggagcccccaagcccaaggccaaccagcagaagcaggacgacggccggggtctggtgcttcctggctacaagtacctcggacccttcaacggactcgacaagggggagcccgtcaacgcggcggacgcagcggccctcgagcacgacaaggcctacgaccagcagctcaaagcgggtgacaatccgtacctgcggtataaccacgccgacgccgagtttcaggagcgtctgcaagaagatacgtcttttgggggcaacctcgggcgagcagtcttccaggccaagaagcgggttctcgaacctctcggtctggttgaggaagctgctaagacggctcctggaaagaagagaccggtagaaccgtcacctcagcgttcccccgactcctccacgggcatcggcaagaaaggccagcagcccgctagaaagagactgaactttgggcagactggcgactcagagtcagtccccgaccctcaaccaatcggagaaccaccagcaggcccctctggtctgggatctggtacaatggctgcaggcggtggcgccccaatggcagacaataacgaaggcgccgacggagtgggtaatgcctcaggaaattggcattgcgattccacatggctgggcgacagagtcatcaccaccagcacccgaacctgggctttgcccacctacaacaaccacctctacaagcaaatctccagtcagtcagcaggtagcaccaacgacaacgtctacttcggctacagcaccccctgggggtattttgacttcaacagattccactgtcacttctcaccacgtgactggcagcggctcatcaacaacaactggggattccggcccaagaagctcaacttcaagctgttcaacatccaggtcaaggaggtcacaacgaatgacggcgtcacgaccatcgccaataaccttaccagcacggttcaggtcttttcggactcggaataccagctgccctacgtcctcggctccgcacaccagggctgcctgcctccgttcccggcggacgtcttcatgattccccagtacggctacctgactctgaacaatggcagccaatcggtgggtcgttcctctttctactgcctggaatatttcccttctcaaatgctgagaacgggcaacaacttcaccatcagctacaccttcgaggacgttcccttccacagcagctacgcacacagccagagcctggaccggctgatgaatcctcttatcgaccagtacctgtattacctggccagaacacagagcaacgcaggaggcacagctggcaatcaggaactgcagttttatcagggcgggcctaccaccatggccgaacaagccaaaaactggctgcctggaccttgcttccggcaacaaagagtctccaagacgctggatcaaaacaacaacagcaactttgcttggactggtgccaccaaataccatctaaatggaagaaattcattggttaatcccggtgtcgccatggcaacccacaaggacgacgaggaacgcttcttcccttcgagcggagtcctgatttttggaaaaactggagcagctaataagactacactggaaaatgtgttaatgacaaatgaagaggaaattcgtcctaccaacccggtagccaccgaggaatacgggactgttagcagcaacctgcaggcggctaacactgcagcccagacacaagttgtcaacaaccagggagccttacctggtatggtctggcagaaccgggacgtgtacctgcagggtcccatctgggccaagattcctcacacagatggcaactttcacccgtctcctttaatgggcggctttggacttaaacatccgcctcctcagatcctcatcaaaaacactcctgttcctgcggatcctccaacagcgttcaaccaggccaagctgaattctttcatcacgcagtacagcaccggacaagtcagcgtggagatcgagtgggagctgcagaaggagaacagcaagcgctggaacccagagattcagtatacttccaactactacaaatctacaaatgtggactttgctgttaatactgagggtgtttactctgagcctcgccccattggcactcgttacctcacccgtaatctgtaa

SEQ ID NO: 499 - protein, 737 aa, Adeno-associated virus
MAADGYLPDWLEDNLSEGIREWWDLKPGAPKPKANQQKQDDGRGLVLPGYKYLGPFNGLDKGEPVNAADAAALEHDKAYDQQLKAGDNPYLRYNHADAEFQERLQEDTSFGGNLGRAVFQAKKRVLEPLGLVEEAAKTAPGKKRPVEPSPQRSPDSSTGIGKKGQQPARKRLNFGQTGDSESVPDPQPIGEPPAGPSGLGSGTMAAGGGAPMADNNEGADGVGNASGNWHCDSTWLGDRVITTSTRTWALPTYNNHLYKQISSQSAGSTNDNVYFGYSTPWGYFDFNRFHCHFSPRDWQRLINNNWGFRPKKLNFKLFNIQVKEVTTNDGVTTIANNLTSTVQVFSDSEYQLPYVLGSAHQGCLPPFPADVFMIPQYGYLTLNNGSQSVGRSSFYCLEYFPSQMLRTGNNFTISYTFEDVPFHSSYAHSQSLDRLMNPLIDQYLYYLARTQSNAGGTAGNQELQFYQGGPTTMAEQAKNWLPGPCFRQQRVSKTLDQNNNSNFAWTGATKYHLNGRNSLVNPGVAMATHKDDEERFFPSSGVLIFGKTGAANKTTLENVLMTNEEEIRPTNPVATEEYGTVSSNLQAANTAAQTQVVNNQGALPGMVWQNRDVYLQGPIWAKIPHTDGNFHPSPLMGGFGLKHPPPQILIKNTPVPADPPTAFNQAKLNSFITQYSTGQVSVEIEWELQKENSKRWNPEIQYTSNYYKSTNVDFAVNTEGVYSEPRPIGTRYLTRNL

SEQ ID NO: 500 - DNA, 2217 bp, Adeno-associated virus
atggctgccgatggttatcttccagattggctcgaggacaacctctctgagggcattcgcgagtggtgggacctgaaacctggagccccgaaacccaaagccaaccagcaaaagcaggacgacggccggggtctggtgcttcctggctacaagtacctcggacccttcaacggactcgacaagggggagcccgtcaacgcggcggacgcagcggccctcgagcacgacaaggcctacgaccagcagctcaaagcgggtgacaatccgtacctgcggtataatcacgccgacgccgagtttcaggagcgtctgcaagaagatacgtcttttgggggcaacctcgggcgagcagtcttccaggccaagaagcgggttctcgaacctctcggtctggttgaggaaggcgctaagacggctcctggaaagaagagaccggtagagccgtcaccacagcgttcccccgactcctccacgggcatcggcaagaaaggccagcagcccgccagaaagagactcaatttcggtcagactggcgactcagagtcagtccccgaccctcaacctatcggagaacctccagcagcgccctctagtgtgggatctggtacaatggctgcaggcggtggcgcaccaatggcagacaataacgaaggtgccgacggagtgggtagttcctcgggaaattggcattgcgattccacatggctgggcgacagagtcatcaccaccagcacccgaacctgggccctgcccgcctacaacaaccacctctacaagcaaatctccaacgggacctcgggaggcagcaccaacgacaacacctactttggctacagcaccccctgggggtattttgactttaacagattccactgccacttctcaccacgtgactggcagcgactcatcaacaacaactggggattccggcccaagagactcagcttcaagctcttcaacatccaggtcaaagaggtcacgcagaatgaaggcaccaagaccatcgccaataacctcaccagcaccatccaggtgtttacggactcggaataccagctgccgtacgtcctcggctctgcccaccagggctgcctgcctccgttcccggcggatgtcttcatgattcctcagtacggctacctgactctcaacaacggtagtcaggccgtgggacgttcctccttctactgcctggagtacttcccctctcagatgctgagaacgggcaacaacttttccttcagctacactttcgaggacgtgcctttccacagcagctacgcgcacagccagagtttggacaggctgatgaatcctctcatcgaccagtacctgtactacctgtcaagaacccagtctacgggaggcacagcgggaacccagcagttgctgttttctcaggccgggcctagcaacatgtcggctcaggccagaaactggctgcctggaccctgctacagacagcagcgcgtctccacgacactgtcgcaaaacaacaacagcaactttgcctggactggtgccaccaagtatcatctgagcggcagagactctctggtgaatccgggcgtcgccatggcaaccaacaaggacgacgaggaccgcttcttcccatccagcggcatcctcatgtttggcaagcagggagctggaaaagacaacgtggactatagcaacgtgatgctaaccagcgaggaagaaatcaagaccaccaaccccgtggccacagaacagtatggcgtggtggctgataacctacagcagcaaaacaccgctcctattgtgggggccgtcaacagccagggagccttacctggcatggtctggcagaaccgggacgtgtacctgcagggtcctatttgggccaagattcctcacacagatggcaactttcacccgtctcctttaatgggcggctttggacttaaacatccgcctcctcagatcctcatcaaaaacactcctgttcctgcggatcctccaacagcgttcaaccaggccaagctgaattcttccatcacgcagtacagcaccggacaagtcagcgtggagatcgagtgggagctgcagaaggagaacagcaagcgctggaacccagagattcagtatacttccaactactacaaatctacaaatgtggactttgctgttaatactgagggtgtttactctgagcctcgccccattggcactcgttacctcacccgtaatttgtaa

SEQ ID NO: 501 - protein, 738 aa, Adeno-associated virus
MAADGYLPDWLEDNLSEGIREWWDLKPGAPKPKANQQKQDDGRGLVLPGYKYLGPFNGLDKGEPVNAADAAALEHDKAYDQQLKAGDNPYLRYNHADAEFQERLQEDTSFGGNLGRAVFQAKKRVLEPLGLVEEGAKTAPGKKRPVEPSPQRSPDSSTGIGKKGQQPARKRLNFGQTGDSESVPDPQPIGEPPAAPSSVGSGTMAAGGGAPMADNNEGADGVGSSSGNWHCDSTWLGDRVITTSTRTWALPAYNNHLYKQISNGTSGGSTNDNTYFGYSTPWGYFDFNRFHCHFSPRDWQRLINNNWGFRPKRLSFKLFNIQVKEVTQNEGTKTIANNLTSTIQVFTDSEYQLPYVLGSAHQGCLPPFPADVFMIPQYGYLTLNNGSQAVGRSSFYCLEYFPSQMLRTGNNFSFSYTFEDVPFHSSYAHSQSLDRLMNPLIDQYLYYLSRTQSTGGTAGTQQLLFSQAGPSNMSAQARNWLPGPCYRQQRVSTTLSQNNNSNFAWTGATKYHLSGRDSLVNPGVAMATNKDDEDRFFPSSGILMFGKQGAGKDNVDYSNVMLTSEEEIKTTNPVATEQYGVVADNLQQQNTAPIVGAVNSQGALPGMVWQNRDVYLQGPIWAKIPHTDGNFHPSPLMGGFGLKHPPPQILIKNTPVPADPPTAFNQAKLNSSITQYSTGQVSVEIEWELQKENSKRWNPEIQYTSNYYKSTNVDFAVNTEGVYSEPRPIGTRYLTRNL

SEQ ID NO: 502 - protein, 736 aa, Adeno-associated virus; identical to SEQ ID NO: 2

SEQ ID NO: 503 - DNA, 2217 bp, Adeno-associated virus
atggctgctgacggttatcttccagattggctcgaggacaacctctctgagggcattcgcgagtggtgggacctgaaacctggagcccccaagcccaaggccaaccagcagaagcaggacgacggccggggtctggtgcttcctggctacaagtacctcggacccttcaacggactcgacaagggggagcccgtcaacgcggcggacgcagcggccctcgagcacgacaaggcctacgaccagcagctcaaagcgggtgacaatccgtacctgcggtataaccacgccgacgccgagtttcaggagcgtctgcaagaagatacgtcttttgggggcaacctcgggcgagcagtcttccaggccaagaagcgggttctcgaacctctcggtctggttgaggaagctgctaagacggctcctggaaagaagagaccggtagaaccgtcacctcagcgttcccccgactcctccacgggcatcggcaagaaaggccagcagcccgctaaaaagagactgaactttggtcagactggcgactcagagtcagtccccgaccctcaaccaatcggagaaccaccagcaggcccctctggtctgggatctggtacaatggctgcaggcggtggcgctccaatggcagacaataacgaaggcgccgacggagtgggtagttcctcaggaaattggcattgcgattccacatggctgggcgacagagtcatcaccaccagcacccgaacctgggccctgcccacctacaacaaccacctctacaagcaaatatccaatgggacatcgggaggaagcaccaacgacaacacctacttcggctacagcaccccctgggggtattttgacttcaacagattccactgccacttctcaccacgtgactggcagcgactcatcaacaacaactggggattccggccaaaaagactcagcttcaagctcttcaacatccaggtcaaggaggtcacgcagaatgaaggcaccaagaccatcgccaataaccttaccagcacgattcaggtatttacggactcggaataccagctgccgtacgtcctcggctccgcgcaccagggctgcctgcctccgttcccggcggacgtcttcatgattccccagtacggctaccttacactgaacaatggaagtcaagccgtaggccgttcctccttctactgcctggaatattttccatctcaaatgctgcgaactggaaacaattttgaattcagctacaccttcgaggacgtgcctttccacagcagctacgcacacagccagagcttggaccgactgatgaatcctctcatcgaccagtacctgtactacttatccagaactcagtccacaggaggaactcaaggtacccagcaattgttattttctcaagctgggcctgcaaacatgtcggctcaggctaagaactggctacctggaccttgctaccggcagcagcgagtctctacgacactgtcgcaaaacaacaacagcaactttgcttggactggtgccaccaaatatcacctgaacggaagagactctttggtaaatcccggtgtcgccatggcaacccacaaggacgacgaggaacgcttcttcccgtcgagtggagtcctgatgtttggaaaacagggtgctggaagagacaatgtggactacagcagcgttatgctaaccagcgaagaagaaattaaaaccactaaccctgtagccacagaacaatacggtgtggtggctgacaacttgcagcaaaccaatacagggcctattgtgggaaatgtcaacagccaaggagccttacctggcatggtctggcagaaccgagacgtgtacctgcagggtcccatctgggccaagattcctcacacggacggcaacttccacccttcaccgctaatgggaggatttggactgaagcacccacctcctcagatcctgatcaagaacacgccggtacctgcggatcctccaacaacgttcagccaggcgaaattggcttccttcattacgcagtacagcaccggacaggtcagcgtggaaatcgagtgggagctgcagaaggagaacagcaaacgctggaacccagagattcagtacacttcaaactactacaaatctacaaatgtggactttgctgtcaatacagagggaacttattctgagcctcgccccattggtactcgttacctcacccgtaatctgtaa

SEQ ID NO: 504 - protein, 738 aa, Adeno-associated virus
MAADGYLPDWLEDNLSEGIREWWDLKPGAPKPKANQQKQDDGRGLVLPGYKYLGPFNGLDKGEPVNAADAAALEHDKAYDQQLKAGDNPYLRYNHADAEFQERLQEDTSFGGNLGRAVFQAKKRVLEPLGLVEEGAKTAPGKKRPVEPSPQRSPDSSTGIGKKGQQPARKRLNFGQTGDSESVPDPQPLGEPPAAPSSVGSGTMAAGGGAPMADNNEGADGVGSSSGNWHCDSTWLGDRVITTSTRTWALPTYNNHLYKQISNGTSGGSTNDNTYFGYSTPWGYFDFNRFHCHFSPRDWQRLINNNWGFRPKRLSFKLFNIQVKEVTQNEGTKTIANNLTSTIQVFTDSEYQLPYVLGSAHQGCLPPFPADVFMIPQYGYLTLNNGSQAVGRSSFYCLEYFPSQMLRTGNNFSFSYTFEDVPFHSSYAHSQSLDRLMNPLIDQYLYYLSRTQSTGGTAGTQQLLFSQAGPSNMSAQARNWLPGPCYRQQRVSTTLSQNNNSNFAWTGATKYHLNGRDSLVNPGVAMATNKDDEDRFFPSSGILMFGKQGAGKDNVDYSNVMLTSEEEIKTTNPVATEQYGVVADNLQRQNTAPIVGAVNSQGALPGMVWQNRDVYLQGPIWAKIPHTDGNFHPSPLMGGFGLKHPPPQILIKNTPVPADPPTAFNQAKLNSFITQYSTGQVSVEIEWELQKENSKRWNPEIQYTSNYYKSTNVDFAVNTEGVYSEPRPIGTRYLTRNL

SEQ ID NO: 505 - protein, 736 aa, Adeno-associated virus
MAADGYLPDWLEDNLSEGIREWLNLKPGAPQPKANQQKQDNARGLVLPGYKYLGPFNGLDKGDPVNEADAAALEHDKAYGQQLKAGDNPYLKYNHADAEFQERLQKDTSFGGNLGKAVFQAKKRILEPLGLVETPAKTAPGKKRPVDPSPQRSPDSSSGIGKKSPHPARKRLNFGQTGEAESVPDPQPIGEPPSDPSSVGSGTMAAGGGAPMADNNEGADGVGNSSGNWHCDSTWLGDRVITTSTRTWALPTYNNHLYKQISSQSGATNDNHYFGYSTPWGYFDFNRFHCHFSPRDWQRLINNNWGFRPKRLSFKLFNIQVKEVTQNDGTTTIANNLTSTVQVFTDSEYQLPYVLGSAHQGCLPPFPADVFMIPQYGYLTLNNGSQAVGRSSFYCLEYFPSQMLRTGNNFQFSYTFEDVPFHSSYAHSQSLDRLMNPLIDQYLYYLSKTQGTNATVQGAKLQFSQAGPSNMRDQARNWLPGPCYRQQRVSKTANDNNNSEYAWTGATKYHLNGRDSLVNPGPAMASHKDDEEKFFPMNGTLVFGKNGAGNSNVDIENVMITDEEEIRTTNPVATEQYGVVSDNLQSSNTRPITGDVDSQGVLPGMVWQDRDVYLQGPIWAKIPHTDGHFHPSPLMGGFGLKHPPPQILIKNTPVPANPATTFTPGKFASFITQYSTGQVSVQIEWELQKENSKRWNPEIQYTSNYNKSVNVDFTVDTNGVYSEPRPIGTRYLTRNL

SEQ ID NO: 506 - protein, 736 aa, Adeno-associated virus; identical to SEQ ID NO: 81

SEQ ID NO: 507 - protein, 736 aa, Adeno-associated virus
MAADGYLPDWLEDNLSEGIREWWDLKPGAPKPKANQQKQDDGRGLVLPGYKYLGPFNGLDKGEPVNAADAAALEHDKAYDQQLKAGDNPYLRYNHADAEFQERLQEDTSFGGNLGRAVFQAKKRVLEPLGLVEEGAKTAPGKKRPVEQSPQEPDSSSGIGKTGQQPAKKRLNFGQTGDSESVPDPQPLGEPPAAPSGLGPNTMASGGGAPMADNNEGADGVGNSSGNWHCDSTWLGDRVITTSTRTWALPTYNNHLYKQISNGTSGGSTNDNTYFGYSTPWGYFDFNRFHCHFSPRDWQRLINNNWGFRPKRLNFKLFNIQVKEVTTNEGTKTIANNLTSTVQVFTDSEYQLPYVLGSAHQGCLPPFPADVFMVPQYGYLTLNNGSQALGRSSFYCLEYFPSQMLRTGNNFQFSYTFEDVPFHSSYAHSQSLDRLMNPLIDQYLYYLVRTQTTGTGGTQTLAFSQAGPSSMANQARNWVPGPCYRQQRVSTTTNQNNNSNFAWTGAAKFKLNGRDSLMNPGVAMASHKDDEDRFFPSSGVLIFGKQGAGNDGVDYSQVLITDEEEIKATNPVATEEYGAVAINNQAANTQAQTGLVHNQGVIPGMVWQNRDVYLQGPIWAKIPHTDGNFHPSPLMGGFGLKHPPPQILIKNTPVPADPPLTFNQAKLNSFITQYSTGQVSVEIEWELQKENSKRWNPEIQYTSNYYKSTNVDFAVNTEGVYSEPRPIGTRYLTRNL

SEQ ID NO: 508 - protein, 736 aa, Artificial Sequence; identical to SEQ ID NO: 507
  Description of Artificial Sequence: Synthetic polypeptide

SEQ ID NO: 509 - protein, 736 aa, Artificial Sequence
  Description of Artificial Sequence: Synthetic polypeptide
MAADGYLPDWLEDNLSEGIREWWDLKPGAPKPKANQQKQDDGRGLVLPGYKYLGPFNGLDKGEPVNAADAAALEHDKAYDQQLKAGDNPYLRYNHADAEFQERLQEDTSFGGNLGRAVFQAKKRVLEPLGLVEEGAKTAPGKKRPVEQSPQEPDSSSGIGKTGQQPAKKRLNFGQTGDSESVPDPQPLGEPPAAPSGLGPNTMASGGGAPMADNNEGADGVGNSSGNWHCDSTWLGDRVITTSTRTWALPTYNNHLYKQISNGTSGGSTNDNTYFGYSTPWGYFDFNRFHCHFSPRDWQRLINNNWGFRPKRLNFKLFNIQVKEVTTNEGTKTIANNLTSTVQVFTDSEYQLPYVLGSAHQGCLPPFPADVFMVPQYGYLTLNNGSQALGRSSFYCLEYFPSQMLRTGNNFQFSYTFEDVPFHSSYAHSQSLDRLMNPLIDQYLYYLVRTQTTGTGGTQTLAFSQAGPSSMANQARNWVPGPCYRQQRVSTTTNQNNNSNFAWTGAAKFKLNGRDSLMNPGVAMASHKDDEDRFFPSSGVLIFGKQGAGNDGVDYSQVLITDEEEIKATNPVATEEYGAVAINNQRANTQAQTGLVHNQGVIPGMVWQNRDVYLQGPIWAKIPHTDGNFHPSPLMGGFGLKHPPPQILIKNTPVPADPPLTFNQAKLNSFITQYSTGQVSVEIEWELQKENSKRWNPEIQYTSNYYKSTNVDFAVNTEGVYSEPRPIGTRYLTRNL

SEQ ID NO: 510 - protein, 736 aa, Artificial Sequence
  Description of Artificial Sequence: Synthetic polypeptide
MAADGYLPDWLEDNLSEGIREWWDLKPGAPKPKANQQKQDDGRGLVLPGYKYLGPFNGLDKGEPVNAADAAALEHDKAYDQQLKAGDNPYLRYNHADAEFQERLQEDTSFGGNLGRAVFQAKKRVLEPLGLVEEGAKTAPGKKRPVEQSPQEPDSSSGIGKTGQQPAKKRLNFGQTGDSESVPDPQPLGEPPAAPSGLGPNTMASGGGAPMADNNEGADGVGNSSGNWHCDSTWLGDRVITTSTRTWALPTYNNHLYKQISNGTSGGSTNDNTYFGYSTPWGYFDFNRFHCHFSPRDWQRLINNNWGFRPKRLNFKLFNIQVKEVTTNEGTKTIANNLTSTVQVFTDSEYQLPYVLGSAHQGCLPPFPADVFMVPQYGYLTLNNGSQALGRSSFYCLEYFPSQMLRTGNNFQFSYTFEDVPFHSSYAHSQSLDRLMNPLIDQYLYYLVRTQTTGTGGTQTLAFSQAGPSSMANQARNWVPGPCYRQQRVSTTTNQNNNSNFAWTGAAKFKLNGRDSLMNPGVAMASHKDDEDAFFPSSGVLIFGKQGAGNDGVDYSQVLITDEEEIKATNPVATEEYGAVAINNQAANTQAQTGLVHNQGVIPGMVWQNRDVYLQGPIWAKIPHTDGNFHPSPLMGGFGLKHPPPQILIKNTPVPADPPLTFNQAKLNSFITQYSTGQVSVEIEWELQKENSKRWNPEIQYTSNYYKSTNVDFAVNTEGVYSEPRPIGTRYLTRNL

SEQ ID NO: 511 - DNA, 1803 bp, Bovine adeno-associated virus
acggcgcctgcggcaaaaaagaggcctctagagcagagtcctcaagagccagactcctcgagcggagttggcaagaaaggcaaacagcctgccagaaagagactcaactttgacgacgaacctggagccggagacgggcctcccccagaaggaccatcttccggagctatgtctactgagactgaaatgcgtgcagcagctggcggaaatggtggcgatgcgggacaaggtgccgagggagtgggtaatgcctccggtgattggcattgcgattccacttggtcagagagccacgtcaccaccacctcaacccgcacctgggtcctgccgacctacaacaaccacctgtacctgcggctcggctcgagcaacgccagcgacaccttcaacggattctccaccccctggggatactttgactttaaccgcttccactgccacttctcgccaagagactggcaaaggctcatcaacaaccactggggactgcgccccaaaagcatgcaagtccgcatcttcaacatccaagttaaggaggtcacgacgtctaacggggagacgaccgtatccaacaacctcaccagcacggtccagatctttgcggacagcacgtacgagctcccgtacgtgatggatgcaggtcaggagggcagcttgcctcctttccccaacgacgtgttcatggtgcctcagtacgggtactgcggactggtaaccggaggcagctctcaaaaccagacagacagaaatgccttctactgtctggagtactttcccagccagatgctgagaaccggaaacaactttgagatggtgtacaagtttgaaaacgtgcccttccactccatgtacgctcacagccagagcctggataggctgatgaacccgctgctggaccagtacctgtgggagctccagtctaccacctctggaggaactctcaaccagggcaattcagccaccaactttgccaagctgaccaaaacaaacttttctggctaccgcaaaaactggctcccggggcccatgatgaagcagcagagattctccaagactgccagtcaaaactacaagattccccagggaagaaacaacagtctgctccattatgagaccagaactaccctcgacggaagatggagcaattttgccccgggaacggccatggcaaccgcagccaacgacgccaccgacttctctcaggcccagctcatctttgcggggcccaacatcaccggcaacaccaccacagatgccaataacctgatgttcacttcagaagatgaacttagggccaccaacccccgggacactgacctgtttggccacctggcaaccaaccagcaaaacgccaccaccgttcctaccgtagacgacgtggacggagtcggcgtgtacccgggaatggtgtggcaggacagagacatttactaccaagggcccatttgggccaaaattccacacacggatggacactttcacccgtctcctctcattggcggatttggactgaaaagcccgcctccacaaatattcatcaaaaacactcctgtacccgccaatcccgcaacgaccttctctccggccagaatcaacagcttcatcacccagtacagcaccggacaggtggctgtcaaaatagaatgggaaatccagaaggagcggtccaagagatggaacccagaggtccagttcacgtccaactacggagcacaggactcgcttctctgggctcccgacaacgccggagcctacaaagagcccagggccattggatcccgatacctcaccaaccacctctag

SEQ ID NO: 512 - DNA, 1617 bp, Bovine adeno-associated virus
atgcgtgcagcagctggcggaaatggtggcgatgcgggacaaggtgccgagggagtgggtaatgcctccggtgattggcattgcgattccacttggtcagagagccacgtcaccaccacctcaacccgcacctgggtcctgccgacctacaacaaccacctgtacctgcggctcggctcgagcaacgccagcgacaccttcaacggattctccaccccctggggatactttgactttaaccgcttccactgccacttctcgccaagagactggcaaaggctcatcaacaaccactggggactgcgccccaaaagcatgcaagtccgcatcttcaacatccaagttaaggaggtcacgacgtctaacggggagacgaccgtatccaacaacctcaccagcacggtccagatctttgcggacagcacgtacgagctcccgtacgtgatggatgcaggtcaggagggcagcttgcctcctttccccaacgacgtgttcatggtgcctcagtacgggtactgcggactggtaaccggaggcagctctcaaaaccagacagacagaaatgccttctactgtctggagtactttcccagccagatgctgagaaccggaaacaactttgagatggtgtacaagtttgaaaacgtgcccttccactccatgtacgctcacagccagagcctggataggctgatgaacccgctgctggaccagtacctgtgggagctccagtctaccacctctggaggaactctcaaccagggcaattcagccaccaactttgccaagctgaccaaaacaaacttttctggctaccgcaaaaactggctcccggggcccatgatgaagcagcagagattctccaagactgccagtcaaaactacaagattccccagggaagaaacaacagtctgctccattatgagaccagaactaccctcgacggaagatggagcaattttgccccgggaacggccatggcaaccgcagccaacgacgccaccgacttctctcaggcccagctcatctttgcggggcccaacatcaccggcaacaccaccacagatgccaataacctgatgttcacttcagaagatgaacttagggccaccaacccccgggacactgacctgtttggccacctggcaaccaaccagcaaaacgccaccaccgttcctaccgtagacgacgtggacggagtcggcgtgtacccgggaatggtgtggcaggacagagacatttactaccaagggcccatttgggccaaaattccacacacggatggacactttcacccgtctcctctcattggcggatttggactgaaaagcccgcctccacaaatattcatcaaaaacactcctgtacccgccaatcccgcaacgaccttctctccggccagaatcaacagcttcatcacccagtacagcaccggacaggtggctgtcaaaatagaatgggaaatccagaaggagcggtccaagagatggaacccagaggtccagttcacgtccaactacggagcacaggactcgcttctctgggctcccgacaacgccggagcctacaaagagcccagggccattggatcccgatacctcaccaaccacctctag

SEQ ID NO: 513 - DNA, 1173 bp, Bovine adeno-associated virus
atggcgctggtaagctggctggtggaacatggcatcacttccgagaagcagtggattcaggagaatcaggagagctacctgtccttcaactccacgggaaactctcggagccagattaaagccgcgcttgacaacgcgtcaaaaattatgagtctgaccaaatctgcctcagactatctcgtgggacagactgttccagaggacatttctgaaaacagaatctggcagatttttgatctcaacggctacgacccggcatacgcgggctctgttctctacggctggtgcactcgcgcctttggaaagaggaacaccgtctggctgtatggacccgcgaccaccggaaagaccaacatcgcggaagccatctctcacaccgtgcccttttatggctgtgtgaactggactaatgagaactttccctttaatgactgtgtggaaaaaatgttgatctggtgggaggagggaaagatgaccagcaaggtggtggaacccgccaaggccatcttgggggggtctagagtacgagtggatcaaaaatgtaaatcctctgtacaagtagactctaccccggtgattatcacctccaatactaacatgtgtgtggtggtggatgggaactccacgacctttgaacaccagcagccgctggaagaccgcatgttcagatttgaactcatgcggcggctcccgccagattttggcaagattaccaagcaggaagtcaaagacttttttgcttgggcaaaggtcaaccaggtgccggtgactcacgagtttatggttcccaagaaagtggcgggaactgagagggcggagacttctagaaaacgcccactggatgacgtcaccaataccaactataaaagtccggagaagcgggcccggctctcagttgttcctgagacgcctcgcagttcagacgtgcctgtagagcccgctcctctgcgacctctcaactggtcttccaggtatgaatgcagatgtgactatcatgctaaatttgactctgtaacgggggaatgtgacgagtgtgaatatttgaatcggggcaaaaatggctgtatctttcataatgctacacattgtcaaatttgtcacgctgttcctccatgggaaaaggaaaatgtgtcagattttaatgattttgatgactgtaataaagagcagtaa

SEQ ID NO: 514 - DNA, 1833 bp, Bovine adeno-associated virus
atggctaccttctatgaagtcattgttcgcgttccatttgatgtggaagagcacctgcctggaatttctgacaactttgtagactgggtaactggtcaaatttgggagctgcctcccgagtcagatttgaatttgactctgattgagcagcctcagctgacggtggctgacagaattcgccgcgtgttcctgtacgagtggaacaaattttccaagcaggagagcaaattctttgtgcagtttgaaaagggatctgaatattttcatctgcacacgctcgtggagacctccggcatctcttctatggtccttggccgctacgtgagtcagattcgcgcccagctggtgaaggtggtgttccagaacattgagccgcggattaacgactgggtcgccatcaccaaggtaaagaagggcggagccaataaggtggtggattctgggtatattcccgcctacctgctgccgaaggtccaaccagagcttcagtgggcgtggactaacctcgaagagtataaattggccgccctcaatctggaggagcgcaaacggctcgtcgctcagtttcagcttgagtcctcgcagcgctcgcaagaggcatcttcccagagggacgtttcggctgacccggtcatcaagagcaagacttcccagaaatacatggcgctggtaagctggctggtggaacatggcatcacttccgagaagcagtggattcaggagaatcaggagagctacctgtccttcaactccacgggaaactctcggagccagattaaagccgcgcttgacaacgcgtcaaaaattatgagtctgaccaaatctgcctcagactatctcgtgggacagactgttccagaggacatttctgaaaacagaatctggcagatttttgatctcaacggctacgacccggcatacgcgggctctgttctctacggctggtgcactcgcgcctttggaaagaggaacaccgtctggctgtatggacccgcgaccaccggaaagaccaacatcgcggaagccatctctcacaccgtgcccttttatggctgtgtgaactggactaatgagaactttccctttaatgactgtgtggaaaaaatgttgatctggtgggaggagggaaagatgaccagcaaggtggtggaacccgccaaggccatcttgggggggtctagagtacgagtggatcaaaaatgtaaatcctctgtacaagtagactctaccccggtgattatcacctccaatactaacatgtgtgtggtggtggatgggaactccacgacctttgaacaccagcagccgctggaagaccgcatgttcagatttgaactcatgcggcggctcccgccagattttggcaagattaccaagcaggaagtcaaagacttttttgcttgggcaaaggtcaaccaggtgccggtgactcacgagtttatggttcccaagaaagtggcgggaactgagagggcggagacttctagaaaacgcccactggatgacgtcaccaataccaactataaaagtccggagaagcgggcccggctctcagttgttcctgagacgcctcgcagttcagacgtgcctgtagagcccgctcctctgcgacctctcaactggtcttccaggtatgaatgcagatgtgactatcatgctaaatttgactctgtaacgggggaatgtgacgagtgtgaatatttgaatcggggcaaaaatggctgtatctttcataatgctacacattgtcaaatttgtcacgctgttcctccatgggaaaaggaaaatgtgtcagattttaatgattttgatgactgtaataaagagcagtaa

SEQ ID NO: 515 - DNA, 2211 bp, Bovine adeno-associated virus
atgtcttttgttgaccaccctccagattggttggaatcgatcggcgacggctttcgtgaatttctcggccttgaggcgggtcccccgaaacccaaggccaatcaacagaagcaagataacgctcgaggtcttgtgcttcctgggtacaagtatcttggtcctgggaacggccttgataagggcgatcctgtcaattttgctgacgaggttgcccgagagcacgacctctcctaccagaaacagcttgaggcgggcgataacccttacctcaagtacaaccacgcggacgcagagtttcaggagaaactcgcttctgacacttcttttgggggaaaccttgggaaggctgttttccaggctaaaaagaggattctcgaacctcttggcctggttgagacgccggataaaacggcgcctgcggcaaaaaagaggcctctagagcagagtcctcaagagccagactcctcgagcggagttggcaagaaaggcaaacagcctgccagaaagagactcaactttgacgacgaacctggagccggagacgggcctcccccagaaggaccatcttccggagctatgtctactgagactgaaatgcgtgcagcagctggcggaaatggtggcgatgcgggacaaggtgccgagggagtgggtaatgcctccggtgattggcattgcgattccacttggtcagagagccacgtcaccaccacctcaacccgcacctgggtcctgccgacctacaacaaccacctgtacctgcggctcggctcgagcaacgccagcgacaccttcaacggattctccaccccctggggatactttgactttaaccgcttccactgccacttctcgccaagagactggcaaaggctcatcaacaaccactggggactgcgccccaaaagcatgcaagtccgcatcttcaacatccaagttaaggaggtcacgacgtctaacggggagacgaccgtatccaacaacctcaccagcacggtccagatctttgcggacagcacgtacgagctcccgtacgtgatggatgcaggtcaggagggcagcttgcctcctttccccaacgacgtgttcatggtgcctcagtacgggtactgcggactggtaaccggaggcagctctcaaaaccagacagacagaaatgccttctactgtctggagtactttcccagccagatgctgagaaccggaaacaactttgagatggtgtacaagtttgaaaacgtgcccttccactccatgtacgctcacagccagagcctggataggctgatgaacccgctgctggaccagtacctgtgggagctccagtctaccacctctggaggaactctcaaccagggcaattcagccaccaactttgccaagctgaccaaaacaaacttttctggctaccgcaaaaactggctcccggggcccatgatgaagcagcagagattctccaagactgccagtcaaaactacaagattccccagggaagaaacaacagtctgctccattatgagaccagaactaccctcgacggaagatggagcaattttgccccgggaacggccatggcaaccgcagccaacgacgccaccgacttctctcaggcccagctcatctttgcggggcccaacatcaccggcaacaccaccacagatgccaataacctgatgttcacttcagaagatgaacttagggccaccaacccccgggacactgacctgtttggccacctggcaaccaaccagcaaaacgccaccaccgttcctaccgtagacgacgtggacggagtcggcgtgtacccgggaatggtgtggcaggacagagacatttactaccaagggcccatttgggccaaaattccacacacggatggacactttcacccgtctcctctcattggcggatttggactgaaaagcccgcctccacaaatattcatcaaaaacactcctgtacccgccaatcccgcaacgaccttctctccggccagaatcaacagcttcatcacccagtacagcaccggacaggtggctgtcaaaatagaatgggaaatccagaaggagcggtccaagagatggaacccagaggtccagttcacgtccaactacggagcacaggactcgcttctctgggctcccgacaacgccggagcctacaaagagcccagggccattggatcccgatacctcaccaaccacctctag

SEQ ID NO: 516 - DNA, 4694 bp, Bovine adeno-associated virus
gtggcactcccccccctgtcgcgttcgctcgttcgctggctcgattgggggggtggcagctcaaagagctgccagacgacggccctctgggccgtcgcccccccaatcgagccagcgaacgagcgaacgcgacaggggggggagtgccacactctctagcaagggggttttgtaggtggtgatgtcattgttgatgtcattatagttgtcacgcgatagttaatgattaacagtcatgtgatgtgtgttatccaataggatgaaagcgcgcgaatgagatctcgcgagacttccggggtataaaaggggtgagtgaacgagcccgccgccattctctgctctggactgctagaggaccctcgctgccatggctaccttctatgaagtcattgttcgcgttccatttgatgtggaagagcacctgcctggaatttctgacaactttgtagactgggtaactggtcaaatttgggagctgcctcccgagtcagatttgaatttgactctgattgagcagcctcagctgacggtggctgacagaattcgccgcgtgttcctgtacgagtggaacaaattttccaagcaggagagcaaattctttgtgcagtttgaaaagggatctgaatattttcatctgcacacgctcgtggagacctccggcatctcttctatggtccttggccgctacgtgagtcagattcgcgcccagctggtgaaggtggtgttccagaacattgagccgcggattaacgactgggtcgccatcaccaaggtaaagaagggcggagccaataaggtggtggattctgggtatattcccgcctacctgctgccgaaggtccaaccagagcttcagtgggcgtggactaacctcgaagagtataaattggccgccctcaatctggaggagcgcaaacggctcgtcgctcagtttcagcttgagtcctcgcagcgctcgcaagaggcatcttcccagagggacgtttcggctgacccggtcatcaagagcaagacttcccagaaatacatggcgctggtaagctggctggtggaacatggcatcacttccgagaagcagtggattcaggagaatcaggagagctacctgtccttcaactccacgggaaactctcggagccagattaaagccgcgcttgacaacgcgtcaaaaattatgagtctgaccaaatctgcctcagactatctcgtgggacagactgttccagaggacatttctgaaaacagaatctggcagatttttgatctcaacggctacgacccggcatacgcgggctctgttctctacggctggtgcactcgcgcctttggaaagaggaacaccgtctggctgtatggacccgcgaccaccggaaagaccaacatcgcggaagccatctctcacaccgtgcccttttatggctgtgtgaactggactaatgagaactttccctttaatgactgtgtggaaaaaatgttgatctggtgggaggagggaaagatgaccagcaaggtggtggaacccgccaaggccatcttgggggggtctagagtacgagtggatcaaaaatgtaaatcctctgtacaagtagactctaccccggtgattatcacctccaatactaacatgtgtgtggtggtggatgggaactccacgacctttgaacaccagcagccgctggaagaccgcatgttcagatttgaactcatgcggcggctcccgccagattttggcaagattaccaagcaggaagtcaaagacttttttgcttgggcaaaggtcaaccaggtgccggtgactcacgagtttatggttcccaagaaagtggcgggaactgagagggcggagacttctagaaaacgcccactggatgacgtcaccaataccaactataaaagtccggagaagcgggcccggctctcagttgttcctgagacgcctcgcagttcagacgtgcctgtagagcccgctcctctgcgacctctcaactggtcttccaggtatgaatgcagatgtgactatcatgctaaatttgactctgtaacgggggaatgtgacgagtgtgaatatttgaatcggggcaaaaatggctgtatctttcataatgctacacattgtcaaatttgtcacgctgttcctccatgggaaaaggaaaatgtgtcagattttaatgattttgatgactgtaataaagagcagtaaataaagtgagtagtcatgtcttttgttgaccaccctccagattggttggaatcgatcggcgacggctttcgtgaatttctcggccttgaggcgggtcccccgaaacccaaggccaatcaacagaagcaagataacgctcgaggtcttgtgcttcctgggtacaagtatcttggtcctgggaacggccttgataagggcgatcctgtcaattttgctgacgaggttgcccgagagcacgacctctcctaccagaaacagcttgaggcgggcgataacccttacctcaagtacaaccacgcggacgcagagtttcaggagaaactcgcttctgacacttcttttgggggaaaccttgggaaggctgttttccaggctaaaaagaggattctcgaacctcttggcctggttgagacgccggataaaacggcgcctgcggcaaaaaagaggcctctagagcagagtcctcaagagccagactcctcgagcggagttggcaagaaaggcaaacagcctgccagaaagagactcaactttgacgacgaacctggagccggagacgggcctcccccagaaggaccatcttccggagctatgtctactgagactgaaatgcgtgcagcagctggcggaaatggtggcgatgcgggacaaggtgccgagggagtgggtaatgcctccggtgattggcattgcgattccacttggtcagagagccacgtcaccaccacctcaacccgcacctgggtcctgccgacctacaacaaccacctgtacctgcggctcggctcgagcaacgccagcgacaccttcaacggattctccaccccctggggatactttgactttaaccgcttccactgccacttctcgccaagagactggcaaaggctcatcaacaaccactggggactgcgccccaaaagcatgcaagtccgcatcttcaacatccaagttaaggaggtcacgacgtctaacggggagacgaccgtatccaacaacctcaccagcacggtccagatctttgcggacagcacgtacgagctcccgtacgtgatggatgcaggtcaggagggcagcttgcctcctttccccaacgacgtgttcatggtgcctcagtacgggtactgcggactggtaaccggaggcagctctcaaaaccagacagacagaaatgccttctactgtctggagtactttcccagccagatgctgagaaccggaaacaactttgagatggtgtacaagtttgaaaacgtgcccttccactccatgtacgctcacagccagagcctggataggctgatgaacccgctgctggaccagtacctgtgggagctccagtctaccacctctggaggaactctcaaccagggcaattcagccaccaactttgccaagctgaccaaaacaaacttttctggctaccgcaaaaactggctcccggggcccatgatgaagcagcagagattctccaagactgccagtcaaaactacaagattccccagggaagaaacaacagtctgctccattatgagaccagaactaccctcgacggaagatggagcaattttgccccgggaacggccatggcaaccgcagccaacgacgccaccgacttctctcaggcccagctcatctttgcggggcccaacatcaccggcaacaccaccacagatgccaataacctgatgttcacttcagaagatgaacttagggccaccaacccccgggacactgacctgtttggccacctggcaaccaaccagcaaaacgccaccaccgttcctaccgtagacgacgtggacggagtcggcgtgtacccgggaatggtgtggcaggacagagacatttactaccaagggcccatttgggccaaaattccacacacggatggacactttcacccgtctcctctcattggcggatttggactgaaaagcccgcctccacaaatattcatcaaaaacactcctgtacccgccaatcccgcaacgaccttctctccggccagaatcaacagcttcatcacccagtacagcaccggacaggtggctgtcaaaatagaatgggaaatccagaaggagcggtccaagagatggaacccagaggtccagttcacgtccaactacggagcacaggactcgcttctctgggctcccgacaacgccggagcctacaaagagcccagggccattggatcccgatacctcaccaaccacctctagcccaattctgttgcataccctcaataaaccgtgtattcgtttcagtaaaatactgcctcttgtggtcattcggcgtacaacagcttacaacaacaacaaaacccccttgctagagagtgtggcactcccccccctgtcgcgttcgctcgttcgctggctcgattgggggggtggcagctcaaagagctgccagacgacggccctctgggccgtcgcccccccaatcgagccagcgaacgagcgaacgcgacaggggggggagtgccac

SEQ ID NO: 517 - protein, 390 aa, Bovine adeno-associated virus
MALVSWLVEHGITSEKQWIQENQESYLSFNSTGNSRSQIKAALDNASKIMSLTKSASDYLVGQTVPEDISENRIWQIFDLNGYDPAYAGSVLYGWCTRAFGKRNTVWLYGPATTGKTNIAEAISHTVPFYGCVNWTNENFPFNDCVEKMLIWWEEGKMTSKVVEPAKAILGGSRVRVDQKCKSSVQVDSTPVIITSNTNMCVVVDGNSTTFEHQQPLEDRMFRFELMRRLPPDFGKITKQEVKDFFAWAKVNQVPVTHEFMVPKKVAGTERAETSRKRPLDDVTNTNYKSPEKRARLSVVPETPRSSDVPVEPAPLRPLNWSSRYECRCDYHAKFDSVTGECDECEYLNRGKNGCIFHNATHCQICHAVPPWEKENVSDFNDFDDCNKEQ

SEQ ID NO: 518 - protein, 610 aa, Bovine adeno-associated virus
MATFYEVIVRVPFDVEEHLPGISDNFVDWVTGQIWELPPESDLNLTLIEQPQLTVADRIRRVFLYEWNKFSKQESKFFVQFEKGSEYFHLHTLVETSGISSMVLGRYVSQIRAQLVKVVFQNIEPRINDWVAITKVKKGGANKVVDSGYIPAYLLPKVQPELQWAWTNLEEYKLAALNLEERKRLVAQFQLESSQRSQEASSQRDVSADPVIKSKTSQKYMALVSWLVEHGITSEKQWIQENQESYLSFNSTGNSRSQIKAALDNASKIMSLTKSASDYLVGQTVPEDISENRIWQIFDLNGYDPAYAGSVLYGWCTRAFGKRNTVWLYGPATTGKTNIAEAISHTVPFYGCVNWTNENFPFNDCVEKMLIWWEEGKMTSKVVEPAKAILGGSRVRVDQKCKSSVQVDSTPVIITSNTNMCVVVDGNSTTFEHQQPLEDRMFRFELMRRLPPDFGKITKQEVKDFFAWAKVNQVPVTHEFMVPKKVAGTERAETSRKRPLDDVTNTNYKSPEKRARLSVVPETPRSSDVPVEPAPLRPLNWSSRYECRCDYHAKFDSVTGECDECEYLNRGKNGCIFHNATHCQICHAVPPWEKENVSDFNDFDDCNKEQ

SEQ ID NO: 519 - protein, 538 aa, Artificial Sequence
  Description of Artificial Sequence: Synthetic polypeptide
MRAAAGGNGGDAGQGAEGVGNASGDWHCDSTWSESHVTTTSTRTWVLPTYNNHLYLRLGSSNASDTFNGFSTPWGYFDFNRFHCHFSPRDWQRLINNHWGLRPKSMQVRIFNIQVKEVTTSNGETTVSNNLTSTVQIFADSTYELPYVMDAGQEGSLPPFPNDVFMVPQYGYCGLVTGGSSQNQTDRNAFYCLEYFPSQMLRTGNNFEMVYKFENVPFHSMYAHSQSLDRLMNPLLDQYLWELQSTTSGGTLNQGNSATNFAKLTKTNFSGYRKNWLPGPMMKQQRFSKTASQNYKIPQGRNNSLLHYETRTTLDGRWSNFAPGTAMATAANDATDFSQAQLIFAGPNITGNTTTDANNLMFTSEDELRATNPRDTDLFGHLATNQQNATTVPTVDDVDGVGVYPGMVWQDRDIYYQGPIWAKIPHTDGHFHPSPLIGGFGLKSPPPQIFIKNTPVPANPATTFSPARINSFITQYSTGQVAVKIEWEIQKERSKRWNPEVQFTSNYGAQDSLLWAPDNAGAYKEPRAIGSRYLTNHL

SEQ ID NO: 520 - protein, 736 aa, Artificial Sequence
  Description of Artificial Sequence: Synthetic polypeptide
MSFVDHPPDWLESIGDGFREFLGLEAGPPKPKANQQKQDNARGLVLPGYKYLGPGNGLDKGDPVNFADEVAREHDLSYQKQLEAGDNPYLKYNHADAEFQEKLASDTSFGGNLGKAVFQAKKRILEPLGLVETPDKTAPAAKKRPLEQSPQEPDSSSGVGKKGKQPARKRLNFDDEPGAGDGPPPEGPSSGAMSTETEMRAAAGGNGGDAGQGAEGVGNASGDWHCDSTWSESHVTTTSTRTWVLPTYNNHLYLRLGSSNASDTFNGFSTPWGYFDFNRFHCHFSPRDWQRLINNHWGLRPKSMQVRIFNIQVKEVTTSNGETTVSNNLTSTVHIFADSTYELPYVMDAGQEGSLPPFPNDVFMVPQYGYCGLVTGGSSQNQTDRNAFYCLEYFPSQMLRTGNNFEMVYKFENVPFHSMYAHSQSLDRLMNPLLDQYLWELQSTTSGGTLNQGNSATNFAKLTNKNFSGYRKNWLPGPMMKQQRFSKTASQNYKIPQGGNNSLLHYETRTTLDRRWSNFAPGTAMATAANDATDFSQAQLIFAGPNITGNTTTDANNLMFTSEDELRATNPRDTDLFGHLATNQQNATTVPTVDDVDGVGVYPGMVWQDRDIYYQGPIWAKIPHTDGHFHPSPLIGGFGLKSPPPQIFIKNTPVPANPATTFSPARINSFITQYSTGQVAVKIEWEIQKERSKRWNPEVQFTSNYGAQDSLLWAPDNAGAYKEPRAIGSRYLTNHL

SEQ ID NO: 521 - protein, 736 aa, Artificial Sequence
  Description of Artificial Sequence: Synthetic polypeptide
MSFVDHPPDWLESIGDGFREFLGLEAGPPKPKANQQKQDNARGLVLPGYKYLGPGNGLDKGDPVNFADEVAREHDLSYQKQLEAGDNPYLKYNHADAEFQEKLASDTSFGGNLGKAVFQAKKRILEPLGLVETPDKTAPAAKKRPLEQSPQEPDSSSGVGKKGKQPARKRLNFDDEPGAGDGPPPEGPSSGAMSTETEMRAAAGGNGGDAGQGAEGVGNASGDWHCDSTWSESHVTTTSTRTWVLPTYNNHLYLRLGSSNASDTFNGFSTPWGYFDFNRFHCHFSPRDWQRLINNHWGLRPKSMQVRIFNIQVKEVTTSNGETTVSNNLTSTVQIFADSTYELPYVMDAGQEGSLPPFPNDVFMVPQYGYCGLVTGGSSQNQTDRNAFYCLEYFPSQMLRTGNNFEMVYKFENVPFHSMYAHSQSLDRLMNPLLDQYLWELQSTTSGGTLNQGNSATNFAKLTKTNFSGYRKNWLPGPMMKQQRFSKTASQNYKIPQGRNNSLLHYETRTTLDGRWSNFAPGTAMATAANDATDFSQAQLIFAGPNITGNTTTDANNLMFTSEDELRATNPRDTDLFGHLATNQQNATTVPTVDDVDGVGVYPGMVWQDRDIYYQGPIWAKIPHTDGHFHPSPLIGGFGLKSPPPQIFIKNTPVPANPATTFSPARINSFITQYSTGQVAVKIEWEIQKERSKRWNPEVQFTSNYGAQDSLLWAPDNAGAYKEPRAIGSRYLTNHL

SEQ ID NO: 522 - protein, 736 aa, Bovine adeno-associated virus; identical to SEQ ID NO: 521

SEQ ID NO: 523 - protein, 600 aa, Bovine adeno-associated virus
TAPAAKKRPLEQSPQEPDSSSGVGKKGKQPARKRLNFDDEPGAGDGPPPEGPSSGAMSTETEMRAAAGGNGGDAGQGAEGVGNASGDWHCDSTWSESHVTTTSTRTWVLPTYNNHLYLRLGSSNASDTFNGFSTPWGYFDFNRFHCHFSPRDWQRLINNHWGLRPKSMQVRIFNIQVKEVTTSNGETTVSNNLTSTVQIFADSTYELPYVMDAGQEGSLPPFPNDVFMVPQYGYCGLVTGGSSQNQTDRNAFYCLEYFPSQMLRTGNNFEMVYKFENVPFHSMYAHSQSLDRLMNPLLDQYLWELQSTTSGGTLNQGNSATNFAKLTKTNFSGYRKNWLPGPMMKQQRFSKTASQNYKIPQGRNNSLLHYETRTTLDGRWSNFAPGTAMATAANDATDFSQAQLIFAGPNITGNTTTDANNLMFTSEDELRATNPRDTDLFGHLATNQQNATTVPTVDDVDGVGVYPGMVWQDRDIYYQGPIWAKIPHTDGHFHPSPLIGGFGLKSPPPQIFIKNTPVPANPATTFSPARINSFITQYSTGQVAVKIEWEIQKERSKRWNPEVQFTSNYGAQDSLLWAPDNAGAYKEPRAIGSRYLTNHL

SEQ ID NO: 524 - DNA, 2214 bp, Artificial Sequence
  Description of Artificial Sequence: Synthetic polynucleotide
atggctgccgatggttatcttccagattggctcgaggacactctctctgaaggaataagacagtggtggaagctcaaacctggcccaccaccaccaaagcccgcagagcggcataaggacgacagcaggggtcttgtgcttcctgggtacaagtacctcggacccttcaacggactcgacaagggagagccggtcaacgaggcagacgccgcggccctcgagcacgacaaagcctacgaccggcagctcgacagcggagacaacccgtacctcaagtacaaccacgccgacgcggagtttcaggagcgccttaaagaagatacgtcttttgggggcaacctcgggcgagcagtcttccaggccaaaaagaggcttcttgaacctcttggtctggttgaggaagcggctaagacggctcctggaaagaagaggcctgtagagcagtctcctcaggaaccggactcctcctcgggcatcggcaagacaggccagcagcccgctaaaaagagactcaatttcggtcagactggcgacacagagtcagtcccagaccctcaaccaatcggagaacctcccgcagccccctcaggtgtgggatctcttacaatggcttcaggtggtggcgcaccagtggcagacaataacgaaggtgccgatggagtgggtagttcctcgggaaattggcattgcgattcccaatggctgggggacagagtcatcaccaccagcacccgaacctgggccctgcccacctacaacaatcacctctacaagcaaatctccaacgggacatcgggaggagccaccaacgacaacacctacttcggctacagcaccccctgggggtattttgactttaacagattccactgccacttttcaccacgtgactggcagcgactcatcaacaacaactggggattccggcccaagagactcagcttcaagctcttcaacatccaggtcaaggaggtcacgcagaatgaaggcaccaagaccatcgccaataaccttaccagcacggtccaggtcttcacggactcggagtaccagctgccgtacgttctcggctctgcccaccagggctgcctgcctccgttcccggcggacgtgttcatgattccccagtacggctacctaacactcaacaacggtagtcaggccgtgggacgctcctccttctactgcctggaatactttccttcgcagatgctgagaaccggcaacaacttccagtttacttacaccttcgaggacgtgcctttccacagcagctacgcccacagccagagcttggaccggctgatgaatcctctgattgaccagtacctgtactacttgtctcggactcaaacaacaggaggcacggcaaatacgcagactctgggcttcagccaaggtgggcctaatacaatggccaatcaggcaaagaactggctgccaggaccctgttaccgccaacaacgcgtctcaacgacaaccgggcaaaacaacaatagcaactttgcctggactgctgggaccaaataccatctgaatggaagaaattcattggctaatcctggcatcgctatggcaacacacaaagacgacaaggagcgtttttttcccagtaacgggatcctgatttttggcaaacaaaatgctgccagagacaatgcggattacagcgatgtcatgctcaccagcgaggaagaaatcaaaaccactaaccctgtggctacagaggaatacggtatcgtggcagataacttgcagcagcaaaacacggctcctcaaattggaactgtcaacagccagggggccttacccggtatggtttggcagaaccgggacgtgtacctgcagggtcccatctgggccaagattcctcacacggacggcaacttccacccgtctccgctgatgggcggctttggcctgaaacatcctccgcctcagatcctgatcaagaacacgcctgtacctgcggatcctccgaccaccttcaaccagtcaaagctgaactctttcatcacgcaatacagcaccggacaggtcagcgtggaaattgaatgggagctgcagaaggaaaacagcaagcgctggaaccccgagatccagtacacctccaactactacaaatctacaagtgtggactttgctgttaatacagaaggcgtgtactctgaaccccaccccattggcacccgttacctcacccgtcccctgtaa

SEQ ID NO: 525 - protein, 737 aa, Artificial Sequence
  Description of Artificial Sequence: Synthetic polypeptide
MAADGYLPDWLEDTLSEGIRQWWKLKPGPPPPKPAERHKDDSRGLVLPGYKYLGPFNGLDKGEPVNEADAAALEHDKAYDRQLDSGDNPYLKYNHADAEFQERLKEDTSFGGNLGRAVFQAKKRLLEPLGLVEEAAKTAPGKKRPVEQSPQEPDSSSGIGKTGQQPAKKRLNFGQTGDTESVPDPQPIGEPPAAPSGVGSLTMASGGGAPVADNNEGADGVGSSSGNWHCDSQWLGDRVITTSTRTWALPTYNNHLYKQISNGTSGGATNDNTYFGYSTPWGYFDFNRFHCHFSPRDWQRLINNNWGFRPKRLSFKLFNIQVKEVTQNEGTKTIANNLTSTVQVFTDSEYQLPYVLGSAHQGCLPPFPADVFMIPQYGYLTLNNGSQAVGRSSFYCLEYFPSQMLRTGNNFQFTYTFEDVPFHSSYAHSQSLDRLMNPLIDQYLYYLSRTQTTGGTANTQTLGFSQGGPNTMANQAKNWLPGPCYRQQRVSTTTGQNNNSNFAWTAGTKYHLNGRNSLANPGIAMATHKDDKERFFPSNGILIFGKQNAARDNADYSDVMLTSEEEIKTTNPVATEEYGIVADNLQQQNTAPQIGTVNSQGALPGMVWQNRDVYLQGPIWAKIPHTDGNFHPSPLMGGFGLKHPPPQILIKNTPVPADPPTTFNQSKLNSFITQYSTGQVSVEIEWELQKENSKRWNPEIQYTSNYYKSTSVDFAVNTEGVYSEPHPIGTRYLTRPL

SEQ ID NO: 526 - protein, 736 aa, Artificial Sequence
  Description of Artificial Sequence: Synthetic polypeptide
MAADGYLPDWLEDNLSEGIREWWDLKPGAPKPKANQQKQDDGRGLVLPGYKYLGPFNGLDKGEPVNAADAAALEHDKAYDQQLKAGDNPYLRYNHADAEFQERLQEDTSFGGNLGRAVFQAKKRVLEPLGLVEEGAKTAPGKKRPVEQSPQEPDSSSGIGKTGQQPAKKRLNFGQTGDTESVPDPQPIGEPPAAPSGVGSLTMASGGGAPVADNNEGADGVGSSSGNWHCDSQWLGDRVITTSTRTWALPTYNNHLYKQISSASTGASNDNHYFGYSTPWGYFDFNRFHCHFSPRDWQRLINNNWGFRPKRLNFKLFNIQVKEVTDNNGVKTIANNLTSTVQVFTDSDYQLPYVLGSAHQGCLPPFPADVFMIPQYGYLTLNNGSQAVGRSSFYCLEYFPSQMLRTGNNFQFTYTFEDVPFHSSYAHSQSLDRLMNPLIDQYLYYLSRTQTTGGTANTQTLGFSQGGPNTMANQAKNWLPGPCYRQQRVSTTTGQNNNSNFAWTAGTKYHLNGRNSLANPGIAMATHKDDKERFFPSNGILIFGKQNAARDNADYSDVMLTSEEEIKTTNPVATEEYGIVADNLQQQNTAPQIGTVNSQGALPGMVWQNRDVYLQGPIWAKIPHTDGNFHPSPLMGGFGLKHPPPQILIKNTPVPADPPTTFNQSKLNSFITQYSTGQVSVEIEWELQKENSKRWNPEIQYTSNYYKSTSVDFAVNTEGVYSEPHPIGTRYLTRPL

SEQ ID NO: 527 - protein, 736 aa, Artificial Sequence
  Description of Artificial Sequence: Synthetic polypeptide
MAADGYLPDWLEDTLSEGIRQWWKLKPGPPPPKPAERHKDDSRGLVLPGYKYLGPFNGLDKGEPVNEADAAALEHDKAYDRQLDSGDNPYLKYNHADAEFQERLQGDTSFGGNLGRAVFQAKKRVLEPLGLVEEGAKTAPGKKRPVEQSPQEPDSSSGIGETGQQPAKKRLNFGQTGDSESVPDPQPLGEPPATPAAVGPTTMASGGGAPMADNNEGADGVGSSSGNWHCDSQWLGDRVITTSTRTWALPTYNNHLYKQISSASTGASNDNHYFGYSTPWGYFDFNRFHCHFSPRDWQRLINNNWGFRPKRLSFKLFNIQVKEVTDNNGVKTIANNLTSTVQVFTDSEYQLPYVLGSAHQGCLPPFPADVFMIPQYGYLTLNNGSQAVGRSSFYCLEYFPSQMLRTGNNFTFSYTFEDVPFHSSYAHSQSLDRLMNPLIDQYLYYLSRTQTTGGTANTQTLGFSQGGPNTMANQAKNWLPGPCYRQQRVSTTTGQNNNSNFAWTAGTKYHLNGRNSLANPGIAMATHKDDKERFFPSNGILIFGKQNAARDNADYSDVMLTSEEEIKTTNPVATEEYGIVADNLQQQNTAPQIGTVNSQGALPGMVWQNRDVYLQGPIWAKIPHTDGNFHPSPLMGGFGLKHPPPQILIKNTPVPADPPTTFNQSKLNSFITQYSTGQVSVEIEWELQKENSKRWNPEIQYTSNYYKSTSVDFAVNTEGVYSEPHPIGTRYLTRPL

SEQ ID NO: 528 - DNA, 2181 bp, Artificial Sequence
  Description of Artificial Sequence: Synthetic polynucleotide
atgtcttttgttgatcaccctccagattggttggaagaagttggtgaaggtcttcgcgagtttttgggccttgaagcgggcccaccgaaaccaaaacccaatcagcagcatcaagatcaagcccgtggtcttgtgctgcctggttataactatctcggacccggaaacggtctcgatcgaggagagcctgtcaacagggcagacgaggtcgcgcgagagcacgacatctcgtacaacgagcagcttgaggcgggagacaacccctacctcaagtacaaccacgcggacgccgagtttcaggagaagctcgccgacgacacatccttcgggggaaacctcggaaaggcagtctttcaggccaagaaaagggttctcgaaccttttggcctggttgaagagggtgctaagacggcccctaccggaaagcggatagacgaccactttccaaaaagaaagaaggctcggaccgaagaggactccaagccttccacctcgtcagacgccgaagctggacccagcggatcccagcagctgcaaatcccagcacaaccagcctcaagtttgggagctgatacaatgtctgcgggaggtggcggcccattgggcgacaataaccaaggtgccgatggagtgggcaatgcctcgggagattggcattgcgattccacgtggatgggggacagagtcgtcaccaagtccacccgcacctgggtgctgcccagctacaacaaccaccagtaccgagagatcaaaagcggctccgtcgacggaagcaacgccaacgcctactttggatacagcaccccctgggggtactttgactttaaccgcttccacagccactggagcccccgagactggcaaagactcatcaacaactattggggcttcagaccccggtctctcagagtcaaaatcttcaacatccaagtcaaagaggtcacggtgcaggactccaccaccaccatcgccaacaacctcacctccaccgtccaagtgtttacggacgacgactaccaactcccgtacgtcgtcggcaacgggaccgagggatgcctgccggccttccccccgcaggtctttacgctgccgcagtacggctacgcgacgctgaaccgagacaacggagacaacccgacagagcggagcagcttcttttgcctagagtactttcccagcaagatgctgaggacgggcaacaactttgagtttacctacagctttgaagaggtgcccttccactgcagcttcgccccgagccagaacctctttaagctggccaacccgctggtggaccagtacctgtaccgcttcgtgagcacctcggccacgggcgccatccagttccaaaagaacctggcgggcagatacgccaacacctacaaaaactggttcccggggcccatgggccgaacccagggctggaacacgagctctggggtcagcagcaccaacagagtcagcgtcaacaacttttccgtctcaaaccggatgaacctggagggggccagctaccaagtgaacccccagcccaacgggatgacaaacacgctccaaggcagcaaccgctacgcgctggaaaacaccatgatcttcaacgctcaaaacgccacgccgggaactacctcggtgtacccagaggacaatctactgctgaccagcgagagcgagactcagcccgtcaaccgggtggcttacaacacgggcggtcagatggccaccaacgcccagaacgccaccacggctcccacggtcgggacctacaacctccaggaagtgcttcctggcagcgtatggatggagagggacgtgtacctccaaggacccatctgggccaagatcccagagacgggggcgcactttcacccctctccggccatgggcggattcggactcaaacacccgccgcccatgatgctcatcaaaaacacgccggtgcccggcaacatcaccagcttctcggacgtgcccgtcagcagcttcatcacccagtacagcaccgggcaggtcaccgtggagatggaatgggagctcaaaaaggaaaactccaagaggtggaacccagagatccagtacaccaacaactacaacgacccccagtttgtggactttgctccagacggctccggcgaatacagaaccaccagagccatcggaacccgatacctcacccgacccctt

SEQ ID NO: 529 - protein, 726 aa, Artificial Sequence
  Description of Artificial Sequence: Synthetic polypeptide
MSFVDHPPDWLEEVGEGLREFLGLEAGPPKPKPNQQHQDQARGLVLPGYNYLGPGNGLDRGEPVNRADEVAREHDISYNEQLEAGDNPYLKYNHADAEFQEKLADDTSFGGNLGKAVFQAKKRVLEPFGLVEEGAKTAPTGKRIDDHFPKRKKARTEEDSKPSTSSDAEAGPSGSQQLQIPAQPASSLGADTMSAGGGGPLGDNNQGADGVGNASGDWHCDSTWMGDRVVTKSTRTWVLPSYNNHQYREIKSGSVDGSNANAYFGYSTPWGYFDFNRFHSHWSPRDWQRLINNYWGFRPRSLRVKIFNIQVKEVTVQDSTTTIANNLTSTVQVFTDDDYQLPYVVGNGTEGCLPAFPPQVFTLPQYGYATLNRDNGDNPTERSSFFCLEYFPSKMLRTGNNFEFTYSFEEVPFHCSFAPSQNLFKLANPLVDQYLYRFVSTSATGAIQFQKNLAGRYANTYKNWFPGPMGRTQGWNTSSGSSTNRVSVNNFSVSNRMNLEGASYQVNPQPNGMTNTLQGSNRYALENTMIFNAQNATPGTTSVYPEDNLLLTSESETQPVNRVAYNTGGQMATNAQNATTAPTVGTYNLQEVLPGSVWMERDVYLQGPIWAKIPETGAHFHPSPAMGGFGLKHPPPMMLIKNTPVPGNITSFSDVPVSSFITQYSTGQVTVEMEWELKKENSKRWNPEIQYTNNYNDPQFVDFAPDGSGEYRTTRAIGTRYLTRPL

SEQ ID NO: 530 - protein, 735 aa, Artificial Sequence
  Description of Artificial Sequence: Synthetic polypeptide
MAADGYLPDWLEDTLSEGIRQWWKLKPGPPPPKPAERHKDDSRGLVLPGYKYLGPFNGLDKGEPVNEADAAALEHDKAYDRQLDSGDNPYLKYNHADAEFQERLKEDTSFGGNLGRAVFQAKKRILEPLGLVEEPVKTAPGKKRPVEHSPAEPDSSSGTGKSGQQPARKRLNFGQTGDADSVPDPQPLGQPPAAPSGLGTNTMASGSGAPMADNNEGADGVGNSSGNWHCDSTWMGDRVITTSTRTWALPTYNNHLYKQISSQSGASNDNHYFGYSTPWGYFDFNRFHCHFSPRDWQRLINNNWGFRPKRLSFKLFNIQVKEVTQNDGTTTIANNLTSTVQVFTDSEYQLPYVLGSAHQGCLPPFPADVFMVPQYGYLTLNNGSQAVGRSSFYCLEYFPSQMLRTGNNFTFSYTFEDVPFHSSYAHSQSLDRLMNPLIDQYLYYLSRTNTPSGTTTMSRLQFSQAGASDIRDQSRNWLPGPCYRQQRVSKTAADNNNSDYSWTGATKYHLNGRDSLVNPGPAMASHKDDEEKYFPQSGVLIFGKQDSGKTNVDIEKVMITDEEEIRTTNPVATEQYGSVSTNLQSGNTQAATSDVNTQGVLPGMVWQDRDVYLQGPIWAKIPHTDGHFHPSPLMGGFGLKHPPPQILIKNTPVPANPSTTFSAAKFASFITQYSTGQVSVEIEWELQKENSKRWNPEIQYTSNYNKSVNVDFTVDTNGVYSEPRPIGTRYLTRNL

SEQ ID NO: 531 - DNA, 1797 bp, Artificial Sequence
  Description of Artificial Sequence: Synthetic polynucleotide
acggctccgaccggagacaagcggaaaggcgaagacgaacctcgtttgcccgacacttcttcacagactcccaagaaaaacaagaagcctcgcaaggaaagaccttccggcggggcagaagatccgggcgaaggcacctcttccaacgctggagcagcagcacccgcctctagtgtgggatcatctatcatggctgaaggaggtggcggcccagtgggcgatgcaggccagggtgccgatggagtgggcaattcctccggaaattggcattgcgattcccaatggctggaaaacggagtcgtcactcgaaccacccgaacctgggtcttgcccagctacaacaaccacctgtacaaacgaatccaaggacccagcggaggcgacaacaacaacaaattctttggattcagcaccccctggggatactttgactacaatcgattccactgccacttttccccgcgagactggcaacgactcatcaacaacaactggggcatccgtcccaaagcgatgcgctttagactctttaacatccaggttaaagaggtcacggtccaagacttcaacaccaccatcggcaacaacctcaccagtacggtccaggtctttgcggacaaggactaccaactgccgtacgtcctcggatcggctaccgaaggcaccttcccgccgttcccagcggatatctacacgatcccgcagtacgggtactgcacgctaaactacaacaacgaggcggtggatcgttcggccttctactgtctggactactttccctcagacatgctgcggacaggaaataactttgagtttacttacaccttcgaggacgttcctttccatagcatgtttgcccacaaccagacgctagaccggctgatgaatcccctcgtggatcagtacctctgggctttcagctccgtcagccaagcaggctcatctggacgagctcttcattactcgcgggcgactaaaaccaacatggcggctcaatataggaactggttacctgggcctttcttccgtgatcagcaaatctttacgggcgctagcaacatcactaaaaataacgtctttagcgtttgggaaaaaggcaagcaatgggaactcgacaatcggaccaacctaatgcagcccggtcctgcggcagcgaccacctttagcggagaacctgaccgtcaagccatgcaaaacacgctggcttttagcaggaccgtctacgatcaaacgaccgccacgaccgatcgtaaccagatactcatcaccaacgaagacgaaatcagacccaccaactcggtcggtatcgacgcgtggggagcagttcccaccaacaaccagtcgatcgtgacccccggcactcgcgcggccgtcaacaatcaaggggcgcttcccgggatggtgtggcaaaacagagacatttaccctacagggacccatttggccaaaattcccgacactgacaatcacttccatccgtccccgcttattgggcggtttggctgcaagcatccccctccccagattttcattaaaaacacacccgtccctgccaacccttcggaaacgttccagacggccaaagtggcctccttcatcaaccagtactcgaccggacagtgcaccgtcgaaatcttttgggaactcaagaaggaaacctccaagcgctggaaccccgaaatccagttcacctccaactttggcaacgcggccgacatccagtttgccgtctccgacacgggatcctattccgaacctcgtcccatcggtacccgttaccttaccaaacctctgtaa

SEQ ID NO: 532 - DNA, 1989 bp, Artificial Sequence
  Description of Artificial Sequence: Synthetic polynucleotide
atgaggtcgtactacgaggtcatcgttcagctgcccaacgacgtcgagagtcaggtacctggaatctccgattcgttcgtcaactggattacgtcgcgagaatggacgttgcctgaggacgccgattgggatttggaccaggtcgatcaagttcaactgacgctcggcgacaaaatccaacgggagattcgaactcattgggggacgatggccaaagaaccggactttcactattttatccaactggaacaaggtgaggtgttctttcatttacacgtcctgctggaaacgtgttccgtaaagccgatggtactcggaagatatatccgacatattcaacaaaaaattgtgagtaaagtctactgcgccacgagcctacgatggaaggatggatgcgtggtgaccaagaccaaaaatttcgggggcgcgaacaaggtccgggccgagtcgtatattcccgcctacctgatcccgaaacagcaaccggaagtgcagtgggcgtggactaacgtgcccgagtatataaaagcgtgcttgcaccgagaactgcgtgccagtctcgcgcgacttcacttcgaggaggcgggcgtctcgcaatccaaggaaaatctcgcgagaactgcagacggcgctcccgtgatgccgacccgcgtcagcaaacgctacatggagctcgtggattggctcgtggagaaggggatcaccaccgagaaggaatggctgctggaaaacagagaaagctttcggagctttcaggcctcgagcaactcggcgcgtcagatcaagacggccctgcaaggcgccattcaggagatgcttctgaccaagacggcggaggactacctcgtcggaaaggatcccgtctcggacgacgacatccgtcagaaccgcatctacaagattctggaactgaaccactacgacccagcgtacgtggggagtattttggtcgggtggtgccagaagaaatggggcaagcgaaacacgctgtggctgttcggacatgcgaccaccggcaagaccaacatcgcggaggctattgcccatgctgtgccgttctatggatgcgttaactggaccaacgagaactttccgttcaacgactgcgtcgaaaaaatgattatctggtgggaggagggcaaaatgaccgccaaagtggtggaaacagccaaggcgattctgggaggatctcgggtgagagtggaccaaaaatgcaaagcttcggttccgatcgaaccgacgccggtcattattaccagtaacaccaacatgtgttatgtcatcgacgggaacacgaccacgttcgagcataagcagccgttggaggacaggatgtttaagctcgaattgctgactcggttgcctgatgactttggtaaggtgaccaaacaggaggtgcgtcaattcttcaggtggtctcaggatcacctgacccctgtgatcccagaattcctagtgcggaaggcggagtctcgcaaaagacccgccccttccggggaaggctatataagcccgacaaagcggcccgcgctcgcagagcagcagcaggcgtcggagagcgcggacccggttcccaccaggtatcgtatcaaatgctcgaaacattgcggtatggataaaatgttgtttccttgccaaatttgtgaatcgatgaacagagatattaatatttgtgctattcataaaacgaccgactgtaaagagtgtttccccgactacggggataaagatgatgtagaactacccccctgtacagaacacaacgtgtctcgttgttatcaatgtcattcgggcgaattgtatcgcgtgacttcggactctgacgagaaacctgcccccgagagtgatgaaggcaccgagccatcctatgctccctgcacgattcaccacctgatgggcaagagtcacgggttagtcacttgcgcggcgtgtcggttgaaaaatagtacgttgcatgatgacttggatgacggtgatctcgaacaataa

SEQ ID NO: 533 - DNA, 1626 bp, Artificial Sequence
  Description of Artificial Sequence: Synthetic polynucleotide
atgaggtcgtactacgaggtcatcgttcagctgcccaacgacgtcgagagtcaggtacctggaatctccgattcgttcgtcaactggattacgtcgcgagaatggacgttgcctgaggacgccgattgggatttggaccaggtcgatcaagttcaactgacgctcggcgacaaaatccaacgggagattcgaactcattgggggacgatggccaaagaaccggactttcactattttatccaactggaacaaggtgaggtgttctttcatttacacgtcctgctggaaacgtgttccgtaaagccgatggtactcggaagatatatccgacatattcaacaaaaaattgtgagtaaagtctactgcgccacgagcctacgatggaaggatggatgcgtggtgaccaagaccaaaaatttcgggggcgcgaacaaggtccgggccgagtcgtatattcccgcctacctgatcccgaaacagcaaccggaagtgcagtgggcgtggactaacgtgcccgagtatataaaagcgtgcttgcaccgagaactgcgtgccagtctcgcgcgacttcacttcgaggaggcgggcgtctcgcaatccaaggaaaatctcgcgagaactgcagacggcgctcccgtgatgccgacccgcgtcagcaaacgctacatggagctcgtggattggctcgtggagaaggggatcaccaccgagaaggaatggctgctggaaaacagagaaagctttcggagctttcaggcctcgagcaactcggcgcgtcagatcaagacggccctgcaaggcgccattcaggagatgcttctgaccaagacggcggaggactacctcgtcggaaaggatcccgtctcggacgacgacatccgtcagaaccgcatctacaagattctggaactgaaccactacgacccagcgtacgtggggagtattttggtcgggtggtgccagaagaaatggggcaagcgaaacacgctgtggctgttcggacatgcgaccaccggcaagaccaacatcgcggaggctattgcccatgctgtgccgttctatggatgcgttaactggaccaacgagaactttccgttcaacgactgcgtcgaaaaaatgattatctggtgggaggagggcaaaatgaccgccaaagtggtggaaacagccaaggcgattctgggaggatctcgggtgagagtggaccaaaaatgcaaagcttcggttccgatcgaaccgacgccggtcattattaccagtaacaccaacatgtgttatgtcatcgacgggaacacgaccacgttcgagcataagcagccgttggaggacaggatgtttaagctcgaattgctgactcggttgcctgatgactttggtaaggtgaccaaacaggaggtgcgtcaattcttcaggtggtctcaggatcacctgacccctgtgatcccagaattcctagtgcggaaggcggagtctcgcaaaagacccgccccttccggggaaggctatataagcccgacaaagcggcccgcgctcgcagagcagcagcaggcgtcggagagcgcggacccggttcccaccagattggttggagcggttggtcaaaaagggagtgaatgctgcagctga

SEQ ID NO: 534 - DNA, 1323 bp, Artificial Sequence
  Description of Artificial Sequence: Synthetic polynucleotide
atggagctcgtggattggctcgtggagaaggggatcaccaccgagaaggaatggctgctggaaaacagagaaagctttcggagctttcaggcctcgagcaactcggcgcgtcagatcaagacggccctgcaaggcgccattcaggagatgcttctgaccaagacggcggaggactacctcgtcggaaaggatcccgtctcggacgacgacatccgtcagaaccgcatctacaagattctggaactgaaccactacgacccagcgtacgtggggagtattttggtcgggtggtgccagaagaaatggggcaagcgaaacacgctgtggctgttcggacatgcgaccaccggcaagaccaacatcgcggaggctattgcccatgctgtgccgttctatggatgcgttaactggaccaacgagaactttccgttcaacgactgcgtcgaaaaaatgattatctggtgggaggagggcaaaatgaccgccaaagtggtggaaacagccaaggcgattctgggaggatctcgggtgagagtggaccaaaaatgcaaagcttcggttccgatcgaaccgacgccggtcattattaccagtaacaccaacatgtgttatgtcatcgacgggaacacgaccacgttcgagcataagcagccgttggaggacaggatgtttaagctcgaattgctgactcggttgcctgatgactttggtaaggtgaccaaacaggaggtgcgtcaattcttcaggtggtctcaggatcacctgacccctgtgatcccagaattcctagtgcggaaggcggagtctcgcaaaagacccgccccttccggggaaggctatataagcccgacaaagcggcccgcgctcgcagagcagcagcaggcgtcggagagcgcggacccggttcccaccaggtatcgtatcaaatgctcgaaacattgcggtatggataaaatgttgtttccttgccaaatttgtgaatcgatgaacagagatattaatatttgtgctattcataaaacgaccgactgtaaagagtgtttccccgactacggggataaagatgatgtagaactacccccctgtacagaacacaacgtgtctcgttgttatcaatgtcattcgggcgaattgtatcgcgtgacttcggactctgacgagaaacctgcccccgagagtgatgaaggcaccgagccatcctatgctccctgcacgattcaccacctgatgggcaagagtcacgggttagtcacttgcgcggcgtgtcggttgaaaaatagtacgttgcatgatgacttggatgacggtgatctcgaacaataa

SEQ ID NO: 535 - DNA, 960 bp, Artificial Sequence
  Description of Artificial Sequence: Synthetic polynucleotide
atggagctcgtggattggctcgtggagaaggggatcaccaccgagaaggaatggctgctggaaaacagagaaagctttcggagctttcaggcctcgagcaactcggcgcgtcagatcaagacggccctgcaaggcgccattcaggagatgcttctgaccaagacggcggaggactacctcgtcggaaaggatcccgtctcggacgacgacatccgtcagaaccgcatctacaagattctggaactgaaccactacgacccagcgtacgtggggagtattttggtcgggtggtgccagaagaaatggggcaagcgaaacacgctgtggctgttcggacatgcgaccaccggcaagaccaacatcgcggaggctattgcccatgctgtgccgttctatggatgcgttaactggaccaacgagaactttccgttcaacgactgcgtcgaaaaaatgattatctggtgggaggagggcaaaatgaccgccaaagtggtggaaacagccaaggcgattctgggaggatctcgggtgagagtggaccaaaaatgcaaagcttcggttccgatcgaaccgacgccggtcattattaccagtaacaccaacatgtgttatgtcatcgacgggaacacgaccacgttcgagcataagcagccgttggaggacaggatgtttaagctcgaattgctgactcggttgcctgatgactttggtaaggtgaccaaacaggaggtgcgtcaattcttcaggtggtctcaggatcacctgacccctgtgatcccagaattcctagtgcggaaggcggagtctcgcaaaagacccgccccttccggggaaggctatataagcccgacaaagcggcccgcgctcgcagagcagcagcaggcgtcggagagcgcggacccggttcccaccagattggttggagcggttggtcaaaaagggagtgaatgctgcagctga

SEQ ID NO: 536 - DNA, 1608 bp, Artificial Sequence
  Description of Artificial Sequence: Synthetic polynucleotide
atggctgaaggaggtggcggcccagtgggcgatgcaggccagggtgccgatggagtgggcaattcctccggaaattggcattgcgattcccaatggctggaaaacggagtcgtcactcgaaccacccgaacctgggtcttgcccagctacaacaaccacctgtacaaacgaatccaaggacccagcggaggcgacaacaacaacaaattctttggattcagcaccccctggggatactttgactacaatcgattccactgccacttttccccgcgagactggcaacgactcatcaacaacaactggggcatccgtcccaaagcgatgcgctttagactctttaacatccaggttaaagaggtcacggtccaagacttcaacaccaccatcggcaacaacctcaccagtacggtccaggtctttgcggacaaggactaccaactgccgtacgtcctcggatcggctaccgaaggcaccttcccgccgttcccagcggatatctacacgatcccgcagtacgggtactgcacgctaaactacaacaacgaggcggtggatcgttcggccttctactgtctggactactttccctcagacatgctgcggacaggaaataactttgagtttacttacaccttcgaggacgttcctttccatagcatgtttgcccacaaccagacgctagaccggctgatgaatcccctcgtggatcagtacctctgggctttcagctccgtcagccaagcaggctcatctggacgagctcttcattactcgcgggcgactaaaaccaacatggcggctcaatataggaactggttacctgggcctttcttccgtgatcagcaaatctttacgggcgctagcaacatcactaaaaataacgtctttagcgtttgggaaaaaggcaagcaatgggaactcgacaatcggaccaacctaatgcagcccggtcctgcggcagcgaccacctttagcggagaacctgaccgtcaagccatgcaaaacacgctggcttttagcaggaccgtctacgatcaaacgaccgccacgaccgatcgtaaccagatactcatcaccaacgaagacgaaatcagacccaccaactcggtcggtatcgacgcgtggggagcagttcccaccaacaaccagtcgatcgtgacccccggcactcgcgcggccgtcaacaatcaaggggcgcttcccgggatggtgtggcaaaacagagacatttaccctacagggacccatttggccaaaattcccgacactgacaatcacttccatccgtccccgcttattgggcggtttggctgcaagcatccccctccccagattttcattaaaaacacacccgtccctgccaacccttcggaaacgttccagacggccaaagtggcctccttcatcaaccagtactcgaccggacagtgcaccgtcgaaatcttttgggaactcaagaaggaaacctccaagcgctggaaccccgaaatccagttcacctccaactttggcaacgcggccgacatccagtttgccgtctccgacacgggatcctattccgaacctcgtcccatcggtacccgttaccttaccaaacctctgtaa

SEQ ID NO: 537 - DNA, 2232 bp, Artificial Sequence
  Description of Artificial Sequence: Synthetic polynucleotide
atgtctctcatttctgatgcgattccagattggttggagcggttggtcaaaaagggagtgaatgctgcagctgatttctaccatttggaaagcggtcctcctcgtcctaaggcaaatcagcaaactcaagaatctcttgaaaaggacgattcgagaggtctcgtgttcccaggctacaattatctaggccctttcaacggtctagataaaggagaacccgtcaacgaggcagacgctgccgccttagaacacgacaaggcttacgacctcgaaatcaaggacgggcacaacccgtactttgagtacaacgaggccgacagacgtttccaggaacgtctcaaagacgatacctcctttggaggcaatttaggtaaagccatcttccaggccaaaaagagggttctcgaaccctttggtctggtggaagactcaaagacggctccgaccggagacaagcggaaaggcgaagacgaacctcgtttgcccgacacttcttcacagactcccaagaaaaacaagaagcctcgcaaggaaagaccttccggcggggcagaagatccgggcgaaggcacctcttccaacgctggagcagcagcacccgcctctagtgtgggatcatctatcatggctgaaggaggtggcggcccagtgggcgatgcaggccagggtgccgatggagtgggcaattcctccggaaattggcattgcgattcccaatggctggaaaacggagtcgtcactcgaaccacccgaacctgggtcttgcccagctacaacaaccacctgtacaaacgaatccaaggacccagcggaggcgacaacaacaacaaattctttggattcagcaccccctggggatactttgactacaatcgattccactgccacttttccccgcgagactggcaacgactcatcaacaacaactggggcatccgtcccaaagcgatgcgctttagactctttaacatccaggttaaagaggtcacggtccaagacttcaacaccaccatcggcaacaacctcaccagtacggtccaggtctttgcggacaaggactaccaactgccgtacgtcctcggatcggctaccgaaggcaccttcccgccgttcccagcggatatctacacgatcccgcagtacgggtactgcacgctaaactacaacaacgaggcggtggatcgttcggccttctactgtctggactactttccctcagacatgctgcggacaggaaataactttgagtttacttacaccttcgaggacgttcctttccatagcatgtttgcccacaaccagacgctagaccggctgatgaatcccctcgtggatcagtacctctgggctttcagctccgtcagccaagcaggctcatctggacgagctcttcattactcgcgggcgactaaaaccaacatggcggctcaatataggaactggttacctgggcctttcttccgtgatcagcaaatctttacgggcgctagcaacatcactaaaaataacgtctttagcgtttgggaaaaaggcaagcaatgggaactcgacaatcggaccaacctaatgcagcccggtcctgcggcagcgaccacctttagcggagaacctgaccgtcaagccatgcaaaacacgctggcttttagcaggaccgtctacgatcaaacgaccgccacgaccgatcgtaaccagatactcatcaccaacgaagacgaaatcagacccaccaactcggtcggtatcgacgcgtggggagcagttcccaccaacaaccagtcgatcgtgacccccggcactcgcgcggccgtcaacaatcaaggggcgcttcccgggatggtgtggcaaaacagagacatttaccctacagggacccatttggccaaaattcccgacactgacaatcacttccatccgtccccgcttattgggcggtttggctgcaagcatccccctccccagattttcattaaaaacacacccgtccctgccaacccttcggaaacgttccagacggccaaagtggcctccttcatcaaccagtactcgaccggacagtgcaccgtcgaaatcttttgggaactcaagaaggaaacctccaagcgctggaaccccgaaatccagttcacctccaactttggcaacgcggccgacatccagtttgccgtctccgacacgggatcctattccgaacctcgtcccatcggtacccgttaccttaccaaacctctgtaa

SEQ ID NO: 538 - protein, 535 aa, Artificial Sequence
  Description of Artificial Sequence: Synthetic polypeptide
MAEGGGGPVGDAGQGADGVGNSSGNWHCDSQWLENGVVTRTTRTWVLPSYNNHLYKRIQGPSGGDNNNKFFGFSTPWGYFDYNRFHCHFSPRDWQRLINNNWGIRPKAMRFRLFNIQVKEVTVQDFNTTIGNNLTSTVQVFADKDYQLPYVLGSATEGTFPPFPADIYTIPQYGYCTLNYNNEAVDRSAFYCLDYFPSDMLRTGNNFEFTYTFEDVPFHSMFAHNQTLDRLMNPLVDQYLWAFSSVSQAGSSGRALHYSRATKTNMAAQYRNWLPGPFFRDQQIFTGASNITKNNVFSVWEKGKQWELDNRTNLMQPGPAAATTFSGEPDRQAMQNTLAFSRTVYDQTTATTDRNQILITNEDEIRPTNSVGIDAWGAVPTNNQSIVTPGTRAAVNNQGALPGMVWQNRDIYPTGTHLAKIPDTDNHFHPSPLIGRFGCKHPPPQIFIKNTPVPANPSETFQTAKVASFINQYSTGQCTVEIFWELKKETSKRWNPEIQFTSNFGNAADIQFAVSDTGSYSEPRPIGTRYLTKPL

SEQ ID NO: 539 - protein, 440 aa, Artificial Sequence
  Description of Artificial Sequence: Synthetic polypeptide
MELVDWLVEKGITTEKEWLLENRESFRSFQASSNSARQIKTALQGAIQEMLLTKTAEDYLVGKDPVSDDDIRQNRIYKILELNHYDPAYVGSILVGWCQKKWGKRNTLWLFGHATTGKTNIAEAIAHAVPFYGCVNWTNENFPFNDCVEKMIIWWEEGKMTAKVVETAKAILGGSRVRVDQKCKASVPIEPTPVIITSNTNMCYVIDGNTTTFEHKQPLEDRMFKLELLTRLPDDFGKVTKQEVRQFFRWSQDHLTPVIPEFLVRKAESRKRPAPSGEGYISPTKRPALAEQQQASESADPVPTRYRIKCSKHCGMDKMLFPCQICESMNRDINICAIHKTTDCKECFPDYGDKDDVELPPCTEHNVSRCYQCHSGELYRVTSDSDEKPAPESDEGTEPSYAPCTIHHLMGKSHGLVTCAACRLKNSTLHDDLDDGDLEQ

SEQ ID NO: 540 - protein, 319 aa, Artificial Sequence
  Description of Artificial Sequence: Synthetic polypeptide
MELVDWLVEKGITTEKEWLLENRESFRSFQASSNSARQIKTALQGAIQEMLLTKTAEDYLVGKDPVSDDDIRQNRIYKILELNHYDPAYVGSILVGWCQKKWGKRNTLWLFGHATTGKTNIAEAIAHAVPFYGCVNWTNENFPFNDCVEKMIIWWEEGKMTAKVVETAKAILGGSRVRVDQKCKASVPIEPTPVIITSNTNMCYVIDGNTTTFEHKQPLEDRMFKLELLTRLPDDFGKVTKQEVRQFFRWSQDHLTPVIPEFLVRKAESRKRPAPSGEGYISPTKRPALAEQQQASESADPVPTRLVGAVGQKGSECCS

SEQ ID NO: 541 - protein, 662 aa, Artificial Sequence
  Description of Artificial Sequence: Synthetic polypeptide
MRSYYEVIVQLPNDVESQVPGISDSFVNWITSREWTLPEDADWDLDQVDQVQLTLGDKIQREIRTHWGTMAKEPDFHYFIQLEQGEVFFHLHVLLETCSVKPMVLGRYIRHIQQKIVSKVYCATSLRWKDGCVVTKTKNFGGANKVRAESYIPAYLIPKQQPEVQWAWTNVPEYIKACLHRELRASLARLHFEEAGVSQSKENLARTADGAPVMPTRVSKRYMELVDWLVEKGITTEKEWLLENRESFRSFQASSNSARQIKTALQGAIQEMLLTKTAEDYLVGKDPVSDDDIRQNRIYKILELNHYDPAYVGSILVGWCQKKWGKRNTLWLFGHATTGKTNIAEAIAHAVPFYGCVNWTNENFPFNDCVEKMIIWWEEGKMTAKVVETAKAILGGSRVRVDQKCKASVPIEPTPVIITSNTNMCYVIDGNTTTFEHKQPLEDRMFKLELLTRLPDDFGKVTKQEVRQFFRWSQDHLTPVIPEFLVRKAESRKRPAPSGEGYISPTKRPALAEQQQASESADPVPTRYRIKCSKHCGMDKMLFPCQICESMNRDINICAIHKTTDCKECFPDYGDKDDVELPPCTEHNVSRCYQCHSGELYRVTSDSDEKPAPESDEGTEPSYAPCTIHHLMGKSHGLVTCAACRLKNSTLHDDLDDGDLEQ

SEQ ID NO: 542 - protein, 541 aa, Artificial Sequence
  Description of Artificial Sequence: Synthetic polypeptide
MRSYYEVIVQLPNDVESQVPGISDSFVNWITSREWTLPEDADWDLDQVDQVQLTLGDKIQREIRTHWGTMAKEPDFHYFIQLEQGEVFFHLHVLLETCSVKPMVLGRYIRHIQQKIVSKVYCATSLRWKDGCVVTKTKNFGGANKVRAESYIPAYLIPKQQPEVQWAWTNVPEYIKACLHRELRASLARLHFEEAGVSQSKENLARTADGAPVMPTRVSKRYMELVDWLVEKGITTEKEWLLENRESFRSFQASSNSARQIKTALQGAIQEMLLTKTAEDYLVGKDPVSDDDIRQNRIYKILELNHYDPAYVGSILVGWCQKKWGKRNTLWLFGHATTGKTNIAEAIAHAVPFYGCVNWTNENFPFNDCVEKMIIWWEEGKMTAKVVETAKAILGGSRVRVDQKCKASVPIEPTPVIITSNTNMCYVIDGNTTTFEHKQPLEDRMFKLELLTRLPDDFGKVTKQEVRQFFRWSQDHLTPVIPEFLVRKAESRKRPAPSGEGYISPTKRPALAEQQQASESADPVPTRLVGAVGQKGSECCS

SEQ ID NO: 543 - protein, 743 aa, Artificial Sequence
  Description of Artificial Sequence: Synthetic polypeptide
MSLISDAIPDWLERLVKKGVNAAADFYHLESGPPRPKANQQTQESLEKDDSRGLVFPGYNYLGPFNGLDKGEPVNEADAAALEHDKAYDLEIKDGHNPYFEYNEADRRFQERLKDDTSFGGNLGKAIFQAKKRVLEPFGLVEDSKTAPTGDKRKGEDEPRLPDTSSQTPKKNKKPRKERPSGGAEDPGEGTSSNAGAAAPASSVGSSIMAEGGGGPVGDAGQGADGVGNSSGNWHCDSQWLENGVVTRTTRTWVLPSYNNHLYKRIQGPSGGDNNNKFFGFSTPWGYFDYNRFHCHFSPRDWQRLINNNWGIRPKAMRFRLFNIQVKEVTVQDFNTTIGNNLTSTVQVFADKDYQLPYVLGSATEGTFPPFPADIYTIPQYGYCTLNYNNEAVDRSAFYCLDYFPSDMLRTGNNFEFTYTFEDVPFHSMFAHNQTLDRLMNPLVDQYLWAFSSVSQAGSSGRALHYSRATKTNMAAQYRNWLPGPFFRDQQIFTGASNITKNNVFSVWEKGKQWELDNRTNLMQPGPAAATTFSGEPDRQAMQNTLAFSRTVYDQTTATTDRNQILITNEDEIRPTNSVGIDAWGAVPTNNQSIVTPGTRAAVNNQGALPGMVWQNRDIYPTGTHLAKIPDTDNHFHPSPLIGRFGCKHPPPQIFIKNTPVPANPSETFQTAKVASFINQYSTGQCTVEIFWELKKETSKRWNPEIQFTSNFGNAADIQFAVSDTGSYSEPRPIGTRYLTKPL

SEQ ID NO: 544 - protein, 598 aa, Artificial Sequence
  Description of Artificial Sequence: Synthetic polypeptide
TAPTGDKRKGEDEPRLPDTSSQTPKKNKKPRKERPSGGAEDPGEGTSSNAGAAAPASSVGSSIMAEGGGGPVGDAGQGADGVGNSSGNWHCDSQWLENGVVTRTTRTWVLPSYNNHLYKRIQGPSGGDNNNKFFGFSTPWGYFDYNRFHCHFSPRDWQRLINNNWGIRPKAMRFRLFNIQVKEVTVQDFNTTIGNNLTSTVQVFADKDYQLPYVLGSATEGTFPPFPADIYTIPQYGYCTLNYNNEAVDRSAFYCLDYFPSDMLRTGNNFEFTYTFEDVPFHSMFAHNQTLDRLMNPLVDQYLWAFSSVSQAGSSGRALHYSRATKTNMAAQYRNWLPGPFFRDQQIFTGASNITKNNVFSVWEKGKQWELDNRTNLMQPGPAAATTFSGEPDRQAMQNTLAFSRTVYDQTTATTDRNQILITNEDEIRPTNSVGIDAWGAVPTNNQSIVTPGTRAAVNNQGALPGMVWQNRDIYPTGTHLAKIPDTDNHFHPSPLIGRFGCKHPPPQIFIKNTPVPANPSETFQTAKVASFINQYSTGQCTVEIFWELKKETSKRWNPEIQFTSNFGNAADIQFAVSDTGSYSEPRPIGTRYLTKPL

SEQ ID NO: 545 - DNA, 4694 bp, Artificial Sequence
  Description of Artificial Sequence: Synthetic polynucleotide
tggccagtttccaagacaggctcgctcgctcactcgggccggggccccaaaggggcccctagcgaccgcttcgcggtcgcggcccgagtgagcgagcgagcctgtcttggaaactggccagcactccggtgaggtaatgccgtcacgtggtcgggaatgggaacgggaaatctcgcgagaacgtaaacaaatataagacggcgccacacggcgctgcgtcatacgcgcgcgcgcaccggcgagatgaggtcgtactacgaggtcatcgttcagctgcccaacgacgtcgagagtcaggtacctggaatctccgattcgttcgtcaactggattacgtcgcgagaatggacgttgcctgaggacgccgattgggatttggaccaggtcgatcaagttcaactgacgctcggcgacaaaatccaacgggagattcgaactcattgggggacgatggccaaagaaccggactttcactattttatccaactggaacaaggtgaggtgttctttcatttacacgtcctgctggaaacgtgttccgtaaagccgatggtactcggaagatatatccgacatattcaacaaaaaattgtgagtaaagtctactgcgccacgagcctacgatggaaggatggatgcgtggtgaccaagaccaaaaatttcgggggcgcgaacaaggtccgggccgagtcgtatattcccgcctacctgatcccgaaacagcaaccggaagtgcagtgggcgtggactaacgtgcccgagtatataaaagcgtgcttgcaccgagaactgcgtgccagtctcgcgcgacttcacttcgaggaggcgggcgtctcgcaatccaaggaaaatctcgcgagaactgcagacggcgctcccgtgatgccgacccgcgtcagcaaacgctacatggagctcgtggattggctcgtggagaaggggatcaccaccgagaaggaatggctgctggaaaacagagaaagctttcggagctttcaggcctcgagcaactcggcgcgtcagatcaagacggccctgcaaggcgccattcaggagatgcttctgaccaagacggcggaggactacctcgtcggaaaggatcccgtctcggacgacgacatccgtcagaaccgcatctacaagattctggaactgaaccactacgacccagcgtacgtggggagtattttggtcgggtggtgccagaagaaatggggcaagcgaaacacgctgtggctgttcggacatgcgaccaccggcaagaccaacatcgcggaggctattgcccatgctgtgccgttctatggatgcgttaactggaccaacgagaactttccgttcaacgactgcgtcgaaaaaatgattatctggtgggaggagggcaaaatgaccgccaaagtggtggaaacagccaaggcgattctgggaggatctcgggtgagagtggaccaaaaatgcaaagcttcggttccgatcgaaccgacgccggtcattattaccagtaacaccaacatgtgttatgtcatcgacgggaacacgaccacgttcgagcataagcagccgttggaggacaggatgtttaagctcgaattgctgactcggttgcctgatgactttggtaaggtgaccaaacaggaggtgcgtcaattcttcaggtggtctcaggatcacctgacccctgtgatcccagaattcctagtgcggaaggcggagtctcgcaaaagacccgccccttccggggaaggctatataagcccgacaaagcggcccgcgctcgcagagcagcagcaggcgtcggagagcgcggacccggttcccaccaggtatcgtatcaaatgctcgaaacattgcggtatggataaaatgttgtttccttgccaaatttgtgaatcgatgaacagagatattaatatttgtgctattcataaaacgaccgactgtaaagagtgtttccccgactacggggataaagatgatgtagaactacccccctgtacagaacacaacgtgtctcgttgttatcaatgtcattcgggcgaattgtatcgcgtgacttcggactctgacgagaaacctgcccccgagagtgatgaaggcaccgagccatcctatgctccctgcacgattcaccacctgatgggcaagagtcacgggttagtcacttgcgcggcgtgtcggttgaaaaatagtacgttgcatgatgacttggatgacggtgatctcgaacaataaatgattgaaatgtagccatgtctctcatttctgatgcgattccagattggttggagcggttggtcaaaaagggagtgaatgctgcagctgatttctaccatttggaaagcggtcctcctcgtcctaaggcaaatcagcaaactcaagaatctcttgaaaaggacgattcgagaggtctcgtgttcccaggctacaattatctaggccctttcaacggtctagataaaggagaacccgtcaacgaggcagacgctgccgccttagaacacgacaaggcttacgacctcgaaatcaaggacgggcacaacccgtactttgagtacaacgaggccgacagacgtttccaggaacgtctcaaagacgatacctcctttggaggcaatttaggtaaagccatcttccaggccaaaaagagggttctcgaaccctttggtctggtggaagactcaaagacggctccgaccggagacaagcggaaaggcgaagacgaacctcgtttgcccgacacttcttcacagactcccaagaaaaacaagaagcctcgcaaggaaagaccttccggcggggcagaagatccgggcgaaggcacctcttccaacgctggagcagcagcacccgcctctagtgtgggatcatctatcatggctgaaggaggtggcggcccagtgggcgatgcaggccagggtgccgatggagtgggcaattcctccggaaattggcattgcgattcccaatggctggaaaacggagtcgtcactcgaaccacccgaacctgggtcttgcccagctacaacaaccacctgtacaaacgaatccaaggacccagcggaggcgacaacaacaacaaattctttggattcagcaccccctggggatactttgactacaatcgattccactgccacttttccccgcgagactggcaacgactcatcaacaacaactggggcatccgtcccaaagcgatgcgctttagactctttaacatccaggttaaagaggtcacggtccaagacttcaacaccaccatcggcaacaacctcaccagtacggtccaggtctttgcggacaaggactaccaactgccgtacgtcctcggatcggctaccgaaggcaccttcccgccgttcccagcggatatctacacgatcccgcagtacgggtactgcacgctaaactacaacaacgaggcggtggatcgttcggccttctactgtctggactactttccctcagacatgctgcggacaggaaataactttgagtttacttacaccttcgaggacgttcctttccatagcatgtttgcccacaaccagacgctagaccggctgatgaatcccctcgtggatcagtacctctgggctttcagctccgtcagccaagcaggctcatctggacgagctcttcattactcgcgggcgactaaaaccaacatggcggctcaatataggaactggttacctgggcctttcttccgtgatcagcaaatctttacgggcgctagcaacatcactaaaaataacgtctttagcgtttgggaaaaaggcaagcaatgggaactcgacaatcggaccaacctaatgcagcccggtcctgcggcagcgaccacctttagcggagaacctgaccgtcaagccatgcaaaacacgctggcttttagcaggaccgtctacgatcaaacgaccgccacgaccgatcgtaaccagatactcatcaccaacgaagacgaaatcagacccaccaactcggtcggtatcgacgcgtggggagcagttcccaccaacaaccagtcgatcgtgacccccggcactcgcgcggccgtcaacaatcaaggggcgcttcccgggatggtgtggcaaaacagagacatttaccctacagggacccatttggccaaaattcccgacactgacaatcacttccatccgtccccgcttattgggcggtttggctgcaagcatccccctccccagattttcattaaaaacacacccgtccctgccaacccttcggaaacgttccagacggccaaagtggcctccttcatcaaccagtactcgaccggacagtgcaccgtcgaaatcttttgggaactcaagaaggaaacctccaagcgctggaaccccgaaatccagttcacctccaactttggcaacgcggccgacatccagtttgccgtctccgacacgggatcctattccgaacctcgtcccatcggtacccgttaccttaccaaacctctgtaaattaaacccttcaataaaccgtttatgcgtaactgtatttccgtctcctgtcgttattcagtcacatgatgcggcattacctcaccggagtgctggccagtttccaagacaggctcgctcgctcactcgggccggggccccaaaggggcccctagcgaccgcttcgcggtcgcggcccgagtgagcgagcgagcctgtcttggaaactggcca

SEQ ID NO: 546 - DNA, 2211 bp, Artificial Sequence
  Description of Artificial Sequence: Synthetic polynucleotide
atggctgctgatggttatcttccagattggctcgaggacactctctctgaaggaataagacagtggtggaagctcaaacctggcccaccaccaccaaagcccgcagagcggcataaggacgacagcaggggtcttgtgcttcctgggtacaagtacctcggacccttcaacggactcgacaagggagagccggtcaacgaggcagacgcagcggccctcgagcacgacaaggcctacgaccagcagctcaaggccggtgacaacccctacctcaagtacaaccacgccgacgcggagttccagcagcggcttcagggcgacacatcgtttgggggcaacctcggcagagcagtcttccaggccaaaaagagggttcttgaacctcttggtctggttgagcaagcgggtgagacggctcctggaaagaagagaccgttgattgaatccccccagcagcccgactcctccacgggtatcggcaaaaaaggcaagcagccggctaaaaagagactcaattttggtcagactggcgactcagagtcagtccccgacccacaacctctcggagaacctccagcaacccccgctgctgtgggacctactacaatggcttcaggtggtggcgcaccaatggcagacaataacgaaggcgccgacggagtgggtaatgcctcaggaaattggcattgcgattccacatggctgggcgacagagtcatcaccaccagcacccgcacctgggccttgcccacctacaataaccacctctacaagcaaatctccagtgcttcaacgggggccagcaacgacaaccactacttcggctacagcaccccctgggggtattttgacttcaacagattccactgccacttttcaccacgtgactggcagcgactcatcaacaacaattggggattccggcccaagagactcaacttcaaactcttcaacatccaagtcaaggaggtcacgacgaatgatggcgtcacaaccatcgctaataaccttaccagcacggttcaagtcttctcggactcagactatcagctcccgtacgtgctcgggtcggctcacgagggctgcctcccgccgttcccagcagacgtcttcatggtgccacagtatggatacctcaccctgaacaacgggagtcaggcagtaggacgctcttcattttactgcctggagtactttccttctcagatgctgcgtaccggaaacaactttaccttcagctacacttttgaggacgttcctttccacagcagctacgctcacagccagagtctggaccgtctcatgaatcctctcatcgaccagtacctgtattacctgaacagaactcagaatcagtccggaagtgcccaaaacaaggacttgctgtttagccgggggtctccagctggcatgtctgttcagcccaaaaactggctacctggaccctgttatcggcagcagcgcgtttctaaaacaaaaacagacaacaacaacagcaactttacctggactggtgcttcaaaatataaccttaatgggcgtgaatctataatcaaccctggcactgctatggcctcacacaaagacgacaaagacaagttctttcccatgagcggtgtcatgatttttggaaaggagagcgccggagcttcaaacactgcattggacaatgtcatgatcacagacgaagaggaaatcaaagccactaaccccgtggccaccgaaagatttgggactgtggcagtcaatctccagagcagcagcacagaccctgcgaccggagatgtgcatgttatgggagccttacctggaatggtgtggcaagacagagacgtatacctgcagggtcccatttgggccaaaattcctcacacagatggacactttcacccgtctcctcttatgggcggctttggactcaagaacccgcctcctcagatcctcatcaaaaacacgcctgttcctgcgaatcctccggcggagttttcagctacaaagtttgcttcattcatcacccaatactccacaggacaagtgagtgtggaaattgaatgggagctgcagaaagaaaacagcaagcgctggaatcccgaagtgcagtacacatccaattatgcaaaatctgccaacgttgattttactgtggacaacaatggactttatactgagcctcgccccattggcacccgttacctcacccgtcccctgtaa

SEQ ID NO: 547 - protein, 736 aa, Artificial Sequence
  Description of Artificial Sequence: Synthetic polypeptide
MAADGYLPDWLEDTLSEGIRQWWKLKPGPPPPKPAERHKDDSRGLVLPGYKYLGPFNGLDKGEPVNEADAAALEHDKAYDQQLKAGDNPYLKYNHADAEFQQRLQGDTSFGGNLGRAVFQAKKRVLEPLGLVEQAGETAPGKKRPLIESPQQPDSSTGIGKKGKQPAKKRLNFGQTGDSESVPDPQPLGEPPATPAAVGPTTMASGGGAPMADNNEGADGVGNASGNWHCDSTWLGDRVITTSTRTWALPTYNNHLYKQISSASTGASNDNHYFGYSTPWGYFDFNRFHCHFSPRDWQRLINNNWGFRPKRLNFKLFNIQVKEVTTNDGVTTIANNLTSTVQVFSDSDYQLPYVLGSAHEGCLPPFPADVFMVPQYGYLTLNNGSQAVGRSSFYCLEYFPSQMLRTGNNFTFSYTFEDVPFHSSYAHSQSLDRLMNPLIDQYLYYLNRTQNQSGSAQNKDLLFSRGSPAGMSVQPKNWLPGPCYRQQRVSKTKTDNNNSNFTWTGASKYNLNGRESIINPGTAMASHKDDKDKFFPMSGVMIFGKESAGASNTALDNVMITDEEEIKATNPVATERFGTVAVNLQSSSTDPATGDVHVMGALPGMVWQDRDVYLQGPIWAKIPHTDGHFHPSPLMGGFGLKNPPPQILIKNTPVPANPPAEFSATKFASFITQYSTGQVSVEIEWELQKENSKRWNPEVQYTSNYAKSANVDFTVDNNGLYTEPRPIGTRYLTRPL

SEQ ID NO: 548 - DNA, 2211 bp, Artificial Sequence
  Description of Artificial Sequence: Synthetic polynucleotide
atggcttccgatggttatcttccagattggctcgaggacaacctctctgagggcatccgcgagtggtgggacttgaaacctggagccccgaaacccaaagccaaccagcaaaagcaggacgacggccggggtctggtgcttcctggctacaagtacctcggacccttcaacggactcgacaagggggagcccgtcaacgcggcggatgcagcggccctcgagcacgacaaggcctacgaccagcagctcagagcgggtgacaatccgtacctgcggtataaccacgccgacgccgagtttcaggagcgtctgcaagaagatacgtcttttgggggcaacctcgggcgagcagtcttccaggccaagaagagggttctcgaaccttttggtctggttgaggaaggtgctaagacggctcctggaaagaaacgtccggtagagcagtcgccacaagagccagactcctcctcgggcattggcaagacaggccagcagcccgctaaaaagagactcaattttggtcagactggcgactcagagtcagtccccgacccacaacctctcggagaacctccagcaacccccgctgctgtgggacctactacaatggcttcaggcggtggcgcaccaatggcagacaataacgaaggcgccgacggagtgggtaatgcctcaggaaattggcattgcgattccacatggctgggcgacagagtcatcaccaccagcacccgaacatgggccttgcccacctataacaaccacctctacaagcaaatctccagtgcttcaacgggggccagcaacgacaaccactacttcggctacagcaccccctgggggtattttgatttcaacagattccactgccatttctcaccacgtgactggcagcgactcatcaacaacaattggggattccggcccaagagactcaacttcaaactcttcaacatccaagtcaaggaggtcacgacgaatgatggcgtcacaaccatcgctaataaccttaccagcacggttcaagtcttctcggactcggagtaccagcttccgtacgtcctcggctctgcgcaccagggctgcctccctccgttcccggcggacgtgttcatgattccgcagtacggctacctaacgctcaacaatggcagccaggcagtgggacggtcatccttttactgcctggaatatttcccatcgcagatgctgagaacgggcaataactttaccttcagctacaccttcgaggacgtgcctttccacagcagctacgcgcacagccagagcctggaccggctgatgaatcctctcatcgaccagtacctgtattacctgaacagaactcagaatcagtccggaagtgcccaaaacaaggacttgctgtttagccgggggtctccagctggcatgtctgttcagcccaaaaactggctacctggaccctgttaccggcagcagcgcgtttctaaaacaaaaacagacaacaacaacagcaactttacctggactggtgcttcaaaatataaccttaatgggcgtgaatctataatcaaccctggcactgctatggcctcacacaaagacgacaaagacaagttctttcccatgagcggtgtcatgatttttggaaaggagagcgccggagcttcaaacactgcattggacaatgtcatgatcacagacgaagaggaaatcaaagccactaaccccgtggccaccgaaagatttgggactgtggcagtcaatctccagagcagcagcacagaccctgcgaccggagatgtgcatgttatgggagccttacctggaatggtgtggcaagacagagacgtatacctgcagggtcccatttgggccaaaattcctcacacagatggacactttcacccgtctcctcttatgggcggctttggacttaagcacccgcctcctcagatcctcatcaaaaacacgcctgttcctgcgaatcctccggcagagttttcggctacaaagtttgcttcattcatcacccagtattctactggccaagtcagcgtggagattgaatgggagctgcagaaagaaaacagcaaacgctggaatcccgaagtgcagtatacatctaactatgcaaaatctgccaacgttgatttcactgtggacaacaatggactttatactgagcctcgtcccattggcacccgttacctcacccgtcccctgtaa

SEQ ID NO: 549 - protein, 736 aa, Artificial Sequence
  Description of Artificial Sequence: Synthetic polypeptide
MASDGYLPDWLEDNLSEGIREWWDLKPGAPKPKANQQKQDDGRGLVLPGYKYLGPFNGLDKGEPVNAADAAALEHDKAYDQQLRAGDNPYLRYNHADAEFQERLQEDTSFGGNLGRAVFQAKKRVLEPFGLVEEGAKTAPGKKRPVEQSPQEPDSSSGIGKTGQQPAKKRLNFGQTGDSESVPDPQPLGEPPATPAAVGPTTMASGGGAPMADNNEGADGVGNASGNWHCDSTWLGDRVITTSTRTWALPTYNNHLYKQISSASTGASNDNHYFGYSTPWGYFDFNRFHCHFSPRDWQRLINNNWGFRPKRLNFKLFNIQVKEVTTNDGVTTIANNLTSTVQVFSDSEYQLPYVLGSAHQGCLPPFPADVFMIPQYGYLTLNNGSQAVGRSSFYCLEYFPSQMLRTGNNFTFSYTFEDVPFHSSYAHSQSLDRLMNPLIDQYLYYLNRTQNQSGSAQNKDLLFSRGSPAGMSVQPKNWLPGPCYRQQRVSKTKTDNNNSNFTWTGASKYNLNGRESIINPGTAMASHKDDKDKFFPMSGVMIFGKESAGASNTALDNVMITDEEEIKATNPVATERFGTVAVNLQSSSTDPATGDVHVMGALPGMVWQDRDVYLQGPIWAKIPHTDGHFHPSPLMGGFGLKHPPPQILIKNTPVPANPPAEFSATKFASFITQYSTGQVSVEIEWELQKENSKRWNPEVQYTSNYAKSANVDFTVDNNGLYTEPRPIGTRYLTRPL

SEQ ID NO: 550 - DNA, 2211 bp, Artificial Sequence
  Description of Artificial Sequence: Synthetic polynucleotide
atggctgctgatggttatcttccagattggctcgaggacactctctctgaaggaataagacagtggtggaagctcaaacctggcccaccaccaccaaagcccgcagagcggcataaggacgacagcaggggtcttgtgcttcctgggtacaagtacctcggacccttcaacggactcgacaagggagagccggtcaacgaggcagacgcagcggccctcgagcacgacaaggcctacgaccagcagctcaaggccggtgacaacccctacctcaagtacaaccacgccgacgcggagttccagcagcggcttcagggcgacacatcgtttgggggcaacctcggcagagcagtcttccaggccaaaaagagggttcttgaacctcttggtctggttgagcaagcgggtgagacggctcctggaaagaagagaccgttgattgaatccccccagcagcccgactcctccacgggtatcggcaaaaaaggcaagcagccggctaaaaagagactcaattttggtcagactggcgactcagagtcagtccccgacccacaacctctcggagaacctccagcaacccccgctgctgtgggacctactacaatggcttcaggtggtggcgcaccaatggcagacaataacgaaggcgccgacggagtgggtaatgcctcaggaaattggcattgcgattccacatggctgggcgacagagtcatcaccaccagcacccgcacctgggccttgcccacctacaataaccacctctacaagcaaatctccagtgcttcaacgggggccagcaacgacaaccactacttcggctacagcaccccctgggggtattttgacttcaacagattccactgccacttttcaccacgtgactggcagcgactcatcaacaacaattggggattccggcccaagagactcaacttcaaactcttcaacatccaagtcaaggaggtcacgacgaatgatggcgtcacaaccatcgctaataaccttaccagcacggttcaagtcttctcggactcagactatcagctcccgtacgtgctcgggtcggctcacgagggctgcctcccgccgttcccagcagacgtcttcatggtgccacagtatggatacctcaccctgaacaacgggagtcaggcagtaggacgctcttcattttactgcctggagtactttccttctcagatgctgcgtaccggaaacaactttaccttcagctacacttttgaggacgttcctttccacagcagctacgctcacagccagagtctggaccgtctcatgaatcctctcatcgaccagtacctgtattacctgaacagaactcagaatcagtccggaagtgcccaaaacaaggacttgctgtttagccgggggtctccaactggcatgtctgttcagcccaaaaactggctacctggaccctgttatcggcagcagcgcgtttctaaaacaaaaacagacaacaacaacagcaactttacctggactggtgcttcaaaatataaccttaatgggcgtgaatctataatcaaccctggcactgctatggcctcacacaaagacgacaaagacaagttctttcccatgagcggtgtcatgatttttggaaaggagagcgccggagcttcaaacactgcattggacaatgtcatgatcacagacgaagaggaaatcaaagccactaaccccgtggccactgaaagatttgggactgtggcagtcaatctccagagcagcagcacagaccctgcgaccggagatgtgcatgccatgggagccttacctggaatggtgtggcaagacagagacgtatacctgcagggtcctatttgggccaaaattcctcacacggatggacactttcacccgtctcctctcatgggcggctttggactcaagaacccgcctcctcagatcctcatcaaaaacacgcctgttcctgcgaatcctccggcggagttttcagctacaaagtttgcttcattcatcacccagtattccacaggacaagtgagcgtggagattgaatgggagctgcagaaagaaaacagcaaacgctggaatcccgaagtgcagtatacatctaactatgcaaaatctgccaacgttgatttcactgtggacaacaatggactttatactgagcctcgccccattggcacccgttacctcacccgtcccctgtaa

SEQ ID NO: 551 - protein, 736 aa, Artificial Sequence
  Description of Artificial Sequence: Synthetic polypeptide
MAADGYLPDWLEDTLSEGIRQWWKLKPGPPPPKPAERHKDDSRGLVLPGYKYLGPFNGLDKGEPVNEADAAALEHDKAYDQQLKAGDNPYLKYNHADAEFQQRLQGDTSFGGNLGRAVFQAKKRVLEPLGLVEQAGETAPGKKRPLIESPQQPDSSTGIGKKGKQPAKKRLNFGQTGDSESVPDPQPLGEPPATPAAVGPTTMASGGGAPMADNNEGADGVGNASGNWHCDSTWLGDRVITTSTRTWALPTYNNHLYKQISSASTGASNDNHYFGYSTPWGYFDFNRFHCHFSPRDWQRLINNNWGFRPKRLNFKLFNIQVKEVTTNDGVTTIANNLTSTVQVFSDSDYQLPYVLGSAHEGCLPPFPADVFMVPQYGYLTLNNGSQAVGRSSFYCLEYFPSQMLRTGNNFTFSYTFEDVPFHSSYAHSQSLDRLMNPLIDQYLYYLNRTQNQSGSAQNKDLLFSRGSPTGMSVQPKNWLPGPCYRQQRVSKTKTDNNNSNFTWTGASKYNLNGRESIINPGTAMASHKDDKDKFFPMSGVMIFGKESAGASNTALDNVMITDEEEIKATNPVATERFGTVAVNLQSSSTDPATGDVHAMGALPGMVWQDRDVYLQGPIWAKIPHTDGHFHPSPLMGGFGLKNPPPQILIKNTPVPANPPAEFSATKFASFITQYSTGQVSVEIEWELQKENSKRWNPEVQYTSNYAKSANVDFTVDNNGLYTEPRPIGTRYLTRPL

SEQ ID NO: 552 - DNA, 2211 bp, Artificial Sequence
  Description of Artificial Sequence: Synthetic polynucleotide
atggctgccgatggttatcttccagattggctcgaggacaacctctctgagggcattcgcgagtggtgggcgctgaaacctggagccccgaagcccaaagccaaccagcaaaagcaggacgacggccggggtctggtgcttcctggctacaagtacctcggacccttcaacggactcgacaagggggagcccgtcaacgcggcggatgcagcggccctcgagcacgacaaggcctacgaccagcagctcaaagcgggtgacaatccgtacctgcggtataaccacgccgacgccgagtttcaggagcgtctgcaagaagatacgtcttttgggggcaacctcgggcgagcagtcttccaggccaagaagcgggttctcgaacctctcggtctggttgaggaaggcgctaagacggctcctggaaagaaacgtccggtagagcaatcgccacaagagccagactcctcctcgggcatcggcaagacaggccagcagcccgctaaaaagagactcaattttggtcagactggcgactcagagtcagtccccgacccacaacctctcggagaacctccagcaacccccgctgctgtgggacctactacaatggcttcaggcggtggcgcaccaatggcagacaataacgaaggcgccgacggagtgggtaatgcctcaggaaattggcattgcgattccacatggctgggcgacagagtcatcaccaccagcacccgaacatgggccttgcccacctataacaaccacctctacaagcaaatctccagtgcttcgacgggggccagcaacgacaaccactacttcggctacagcaccccctgggggtattttgactttaacagattccactgccacttttcaccacgtgactggcagcgactcatcaacaacaactggggattccggcccaagagactcagcttcaagctcttcaacatccaggtcaaggaggtcacgacgaatgatggcgtcacaaccatcgctaataaccttaccagcacggttcaagtcttctcggactcggagtaccagcttccgtacgtcctcggctctgcgcaccagggctgcctccctccgttcccggcggacgtgttcatgattccgcaatacggctacctgacgctcaacaatggcagccaagccgtgggacgttcatccttttactgcctggaatatttcccttctcagatgctgagaacgggcaacaactttaccttcagctacacctttgaggaagtgcctttccacagcagctacgcgcacagccagagcctggaccggctgatgaatcctctcatcgatcaatacctgtattacctgaacagaactcaaaatcagtccggaagtgcccaaaacaaggacttgctgtttagccgtgggtctccagctggcatgtctgttcagcccaaaaactggctacctggaccctgttatcggcagcagcgcgtttctaaaacaaaaacagacaacaacaacagcaattttacctggactggtgcttcaaaatataacctcaatgggcgtgaatccatcatcaaccctggcactgctatggcctcacataaagacgacgaagacaagttctttcccatgagcggtgtcatgatttttggaaaagagagcgccggagcttcaaacactgcattggacaatgtcatgattacagacgaagaggaaattaaagccactaaccctgtggccaccgaaagatttgggaccgtggcagtcaatttccagagcagcagcacagaccctgcgaccggagatgtgcatgctatgggagcattacctggcatggtgtggcaagatagagacgtgtacctgcagggtcccatttgggccaaaattcctcacacagatggacactttcacccgtctcctcttatgggcggctttggactcaagaacccgcctcctcagatcctcatcaaaaacacgcctgttcctgcgaatcctccggcggagttttcagctacaaagtttgcttcattcatcacccaatactccacaggacaagtgagcgtggagattgaatgggagctgcagaaagaaaacagcaaacgctggaatcccgaagtgcagtatacatctaactatgcaaaatctgccaacattgatttcactgtggacaacaatggactttatactgagcctcgccccattggcacccgttacctcacccgtccccagtaa

SEQ ID NO: 553 - protein, 736 aa, Artificial Sequence
  Description of Artificial Sequence: Synthetic polypeptide
MAADGYLPDWLEDNLSEGIREWWALKPGAPKPKANQQKQDDGRGLVLPGYKYLGPFNGLDKGEPVNAADAAALEHDKAYDQQLKAGDNPYLRYNHADAEFQERLQEDTSFGGNLGRAVFQAKKRVLEPLGLVEEGAKTAPGKKRPVEQSPQEPDSSSGIGKTGQQPAKKRLNFGQTGDSESVPDPQPLGEPPATPAAVGPTTMASGGGAPMADNNEGADGVGNASGNWHCDSTWLGDRVITTSTRTWALPTYNNHLYKQISSASTGASNDNHYFGYSTPWGYFDFNRFHCHFSPRDWQRLINNNWGFRPKRLSFKLFNIQVKEVTTNDGVTTIANNLTSTVQVFSDSEYQLPYVLGSAHQGCLPPFPADVFMIPQYGYLTLNNGSQAVGRSSFYCLEYFPSQMLRTGNNFTFSYTFEEVPFHSSYAHSQSLDRLMNPLIDQYLYYLNRTQNQSGSAQNKDLLFSRGSPAGMSVQPKNWLPGPCYRQQRVSKTKTDNNNSNFTWTGASKYNLNGRESIINPGTAMASHKDDEDKFFPMSGVMIFGKESAGASNTALDNVMITDEEEIKATNPVATERFGTVAVNFQSSSTDPATGDVHAMGALPGMVWQDRDVYLQGPIWAKIPHTDGHFHPSPLMGGFGLKNPPPQILIKNTPVPANPPAEFSATKFASFITQYSTGQVSVEIEWELQKENSKRWNPEVQYTSNYAKSANIDFTVDNNGLYTEPRPIGTRYLTRPQ

SEQ ID NO: 554 - DNA, 2211 bp, Artificial Sequence
  Description of Artificial Sequence: Synthetic polynucleotide
atggctgccgatggttatcttccagattggctcgaggacaacctctctgagggcattcgcgagtggtgggacttgaaacctggagccccgaaacccaaagccaaccagcaaaagcaggacgacggccggggtctggtgcttcctggctacaagtacctcggacccttcaacggactcgacaagggggagcccgtcaacgcggcggatgcagcggccctcgagcacgacaaggcctacgaccagcagctcaaagcgggtgacaatccgtaccttcggtataaccacgccgacgccgagtttcaggagcgtctgcaagaagatacgtcttttgggggcaacctcgggcgagcagtcttccaggccaaaaagagggttctcgaacctctcggtctggttgaggaagcggctaagacggctcctggaaagaaacgtccggtagagcagtcgccacaagagccagactcctcctcgggcattggcaagacaggccagcagcccgctaaaaagagactcaattttggtcagactggcgactcagagtcagtccccgacccacaacctctcggagaacctcccgcagccccctcaggtgtgggatctcttacaatggcttcaggtggtggcgcaccaatggcagacaataacgaaggcgccgacggagtgggtaatgcctcaggaaattggcattgcgattccacatggctgggcgacagagtcatcaccaccagcacccgcacctgggccttgcccacctacaataaccacctctacaagcaaatctccagtgcttcaacgggggccagcaacgacaaccactacttcggctacagcaccccctgggggtattttgacttcaacagattccactgccacttttcaccacgtgactggcaaagactcatcaacaacaattggggattccggcccaagagactcaacttcaagctcttcaacatccaagtcaaggaggtcacgacgaatgatggcgtcacgaccatcgctaataaccttaccagcacggttcaagtcttctcggactcggagtaccagttgccgtacgtcctcggctctgcgcaccagggctgcctccctccgttcccggcggacgtgttcatgattccgcagtacggctacctaacgctcaacaatggcagccaggcagtgggacggtcatccttttactgcctggaatatttcccatcgcagatgctgagaacgggcaacaactttaccttcagctacacctttgaggaagtgcctttccacagcagctacgcgcacagccagagcctggaccggctgatgaatcctctcatcgaccagtacctgtattacctgaacagaactcaaaatcagtccggaagtgcccaaaacaaggacttgctgtttagccgtgggtctccagctggcatgtctgttcagcccaaaaactggctacctggaccctgttaccggcagcagtgcgtttctaaaacaaaaacagacaacaacaacagcaactttacctggactggtgcttcaaaatataaccttaatgggcgtgaatctataatcaaccctggcactgctatggcctcacacaaagacgacaaagacaagttctttcccatgagcggtgtcatgatttttggaaaggagagcgccggagcttcaaacactgcattggacaatgtcatgatcacagacgaagaggaaatcaaagccactaaccccgtggccaccgaaagatttgggactgtggcagtcaatctccagagcagcagcacagaccctgcgaccggagatgtgcatgttatgggagccttacctggaatggtgtggcaagacagagacgtatacctgcagggtcctatttgggccaaaattcctcacacagatggacactttcacccgtctcctcttatgggcggctttggactcaagaacccgcctcctcagatcctcatcaaaaacacgcctgttcctgcgaatcctccggcggagttttcagctacaaagtttgcttcattcatcacccaatactccacaggacaagtgagcgtggagattgaatgggagctgcagaaagaaaacagcaagcgctggaatcccgaagtgcagtacacatccaattatgcaaaatctgccaacgttgatttcactgtggacaacaatggactttatactgagcctcgccccattggcacccgttacctcacccgtcccctgtaa

SEQ ID NO: 555 - protein, 736 aa, Artificial Sequence
  Description of Artificial Sequence: Synthetic polypeptide
MAADGYLPDWLEDNLSEGIREWWDLKPGAPKPKANQQKQDDGRGLVLPGYKYLGPFNGLDKGEPVNAADAAALEHDKAYDQQLKAGDNPYLRYNHADAEFQERLQEDTSFGGNLGRAVFQAKKRVLEPLGLVEEAAKTAPGKKRPVEQSPQEPDSSSGIGKTGQQPAKKRLNFGQTGDSESVPDPQPLGEPPAAPSGVGSLTMASGGGAPMADNNEGADGVGNASGNWHCDSTWLGDRVITTSTRTWALPTYNNHLYKQISSASTGASNDNHYFGYSTPWGYFDFNRFHCHFSPRDWQRLINNNWGFRPKRLNFKLFNIQVKEVTTNDGVTTIANNLTSTVQVFSDSEYQLPYVLGSAHQGCLPPFPADVFMIPQYGYLTLNNGSQAVGRSSFYCLEYFPSQMLRTGNNFTFSYTFEEVPFHSSYAHSQSLDRLMNPLIDQYLYYLNRTQNQSGSAQNKDLLFSRGSPAGMSVQPKNWLPGPCYRQQCVSKTKTDNNNSNFTWTGASKYNLNGRESIINPGTAMASHKDDKDKFFPMSGVMIFGKESAGASNTALDNVMITDEEEIKATNPVATERFGTVAVNLQSSSTDPATGDVHVMGALPGMVWQDRDVYLQGPIWAKIPHTDGHFHPSPLMGGFGLKNPPPQILIKNTPVPANPPAEFSATKFASFITQYSTGQVSVEIEWELQKENSKRWNPEVQYTSNYAKSANVDFTVDNNGLYTEPRPIGTRYLTRPL

SEQ ID NO: 556 - DNA, 2211 bp, Artificial Sequence
  Description of Artificial Sequence: Synthetic polynucleotide
atggctgccgatggttatcttccagattggctcgaggacaacctctctgagggcattcgcgaatggtgggacttgaaacctggagccccgaaacccaaagtcaaccagcaaaagcaggacaacgctcggggtcttgtgcttccgggttacaaatacctcggacccttcaacggactcgacaagggggagcccgtcaacgcggcggacgcagcggccctcgagcacgacaaggcctacgaccagcagctcaaagcgggtgacaatccgtaccttcggtataaccacgccgacgccgagtttcaggagcgtctgcaagaagatacgtcttttgggggcaaccttggacgagcagtcttccaggccaagaagagggttctcgaaccttttggtctggttgaggaaggtgctaagacggctcctggaaagaaacgtccggtagagcagtcgccacaagagccagactcctcctcgggcattggcaagacaggccagcagcccgctaaaaagagactcaattttggtcagactggcgactcagagtcagtccccgacccacaacctctcggagaacctccagcaacccccgctgctgtgggacctactacaatggcttcaggcggtggcgcaccaatggcagacaataacgaaggcgccgacggagtgggtaatgcctcaggaaattggcattgcgattccacatggctgggcgacagagtcatcaccaccagcacccgcacctgggccttgcccacctacaataaccacctctacaagcaaatctccagtgcttcaacgggggccagcaacgacaaccactacttcggctacagcaccccctgggggtattttgacttcaacagattccactgccacttttcaccacgtgactggcaaagactcatcaacaacaattggggattccggcccaagagactcaacttcaagctcttcaacatccaagtcaaggaggtcacgacgaatgatggcgtcacgaccatcgctaataaccttaccagcacggttcaagtcttctcggactcggagtaccagttgccgtacgtcctcggctctgcgcaccagggctgcctccctccgttcccggcggacgtgttcatgattccgcaatacggctacctgacgctcaacaatggcagccaggcagtgggacggtcatccttttactgcctggaatatttcccatcgcagatgctgagaacgggcaataactttaccttcagctacacttttgaggacgttcctttccacagcagctacgctcacagccagagcctggaccggctgatgaatcctctcatcgaccagtacctgtattacctgaacagaactcagaatcagtccggaagtgcccaaaacaaggacttgctgtttagccgtgggtctccaactggcatgtctgttcagcccaaaaactggctacctggaccctgttatcggcagcagcgcgtttctaaaacaaaaacagacaacaacaacagcaactttacctggactggtgcttcaaaatataaccttaatgggcgtgaatctataatcaaccctggcactgctatggcctcacacaaagacgacgaagacaagttctttcccatgagcggtgtcatgatttttggaaaggagagcgccggagcttcaaacactgcattggacaatgtcatgatcacagacgaagaggaaatcaaagccactaaccccgtggccactgaaagatttgggactgtggcagtcaatctccagagcagcagcacagaccctgcgaccggagatgtgcatgccatgggagccttacctggaatggtgtggcaagacagagacgtatacctgcagggtcctatttgggccaaaattcctcacacggatggacactttcacccgtctcctctcatgggcggctttggacttaagcacccgcctcctcagatcctcatcaaaaacacgcctgttcctgcgaatcctccggcagagttttcggctacaaagtttgcttcattcatcacccagtattccacaggacaagtgagcgtggagattgaatgggagctgcagaaagaaaacagcaaacgctggaatcccgaagtgcagtatacatctaactatgcaaaatctgccaacgttgatttcactgtggacaacaatggactttatactgagcctcgccccattggcacccgttacctcacccgtcccctgtaa

SEQ ID NO: 557 - protein, 736 aa, Artificial Sequence
  Description of Artificial Sequence: Synthetic polypeptide
MAADGYLPDWLEDNLSEGIREWWDLKPGAPKPKVNQQKQDNARGLVLPGYKYLGPFNGLDKGEPVNAADAAALEHDKAYDQQLKAGDNPYLRYNHADAEFQERLQEDTSFGGNLGRAVFQAKKRVLEPFGLVEEGAKTAPGKKRPVEQSPQEPDSSSGIGKTGQQPAKKRLNFGQTGDSESVPDPQPLGEPPATPAAVGPTTMASGGGAPMADNNEGADGVGNASGNWHCDSTWLGDRVITTSTRTWALPTYNNHLYKQISSASTGASNDNHYFGYSTPWGYFDFNRFHCHFSPRDWQRLINNNWGFRPKRLNFKLFNIQVKEVTTNDGVTTIANNLTSTVQVFSDSEYQLPYVLGSAHQGCLPPFPADVFMIPQYGYLTLNNGSQAVGRSSFYCLEYFPSQMLRTGNNFTFSYTFEDVPFHSSYAHSQSLDRLMNPLIDQYLYYLNRTQNQSGSAQNKDLLFSRGSPTGMSVQPKNWLPGPCYRQQRVSKTKTDNNNSNFTWTGASKYNLNGRESIINPGTAMASHKDDEDKFFPMSGVMIFGKESAGASNTALDNVMITDEEEIKATNPVATERFGTVAVNLQSSSTDPATGDVHAMGALPGMVWQDRDVYLQGPIWAKIPHTDGHFHPSPLMGGFGLKHPPPQILIKNTPVPANPPAEFSATKFASFITQYSTGQVSVEIEWELQKENSKRWNPEVQYTSNYAKSANVDFTVDNNGLYTEPRPIGTRYLTRPL

SEQ ID NO: 558 - DNA, 2208 bp, Artificial Sequence
  Description of Artificial Sequence: Synthetic polynucleotide
  modified_base (955)..(955): n = a, c, t, or g
  misc_feature (955)..(955): n is a, c, g, or t
  modified_base (971)..(972): n = a, c, t, or g
  misc_feature (971)..(972): n is a, c, g, or t
  modified_base (981)..(981): n = a, c, t, or g
  misc_feature (981)..(981): n is a, c, g, or t
  modified_base (986)..(986): n = a, c, t, or g
  misc_feature (986)..(986): n is a, c, g, or t
  modified_base (1235)..(1235): n = a, c, t, or g
  misc_feature (1235)..(1235): n is a, c, g, or t
  modified_base (1694)..(1696): n = a, c, t, or g
  misc_feature (1694)..(1696): n is a, c, g, or t
  modified_base (1698)..(1698): n = a, c, t, or g
  misc_feature (1698)..(1698): n is a, c, g, or t
  modified_base (1763)..(1765): n = a, c, t, or g
  misc_feature (1763)..(1765): n is a, c, g, or t
  modified_base (1778)..(1778): n = a, c, t, or g
  misc_feature (1778)..(1778): n is a, c, g, or t
  modified_base (2204)..(2204): n = a, c, t, or g
  misc_feature (2204)..(2204): n is a, c, g, or t
atggctgccgatggttatcttccagattggctcgaggacaacctctctgagggcattcgcgaatggtgggacttgaaacctggagccccgaaacccaaagtcaaccagcaaaagcaggacaacgctcggggtcttgtgcttccgggttacaaatacctcggacccttcaacggactcgacaagggggagcccgtcaacgcggcggacgcagcggccctcgagcacgacaaggcctacgaccagcagctcaaagcgggtgacaatccgtaccttcggtataaccacgccgacgccgagtttcaggagcgtctgcaagaagatacgtcttttgggggcaaccttggacgagcagtcttccaggccaagaagagggttctcgaaccttttggtctggttgaggaaggtgctaagacggctcctggaaagaaacgtccggtagagcagtcgccacaagagccagactcctcctcgggcattggcaagacaggccagcagcccgctaaaaagagactcaattttggtcagactggcgactcagagtcagtccccgacccacaacctctcggagaacctccagcaacccccgctgctgtgggacctactacaatggcttcaggcggtggcgcaccaatggcagacaataacgaaggcgccgacggagtgggtaatgcctcaggaaattggcattgcgattccacatggctgggcgacagagtcatcaccaccagcacccgaacatgggccttgcccacctataacaaccacctctacaagcaaatctccagtgcttcaacgggggccagcaacgacaaccactacttcggctacagcaccccctgggggtattttgatttcaacagattccactgccacttttcaccacgtgactggcagcgactcatcaataacaattggggattccggcccaagagactcaacttcaaactcttcaacntccaagtcaaggaggnnacgacgaangatgncgtcacaaccatcgctaataaccttaccagcacggttcaagtcttctcggactcggagtaccagcttccgtacgtcctcggctctgcgcaccagggctgcctccctccgttcccggcggacgtgttcatgattccgcaatacggctacctgacgctcaacaatggcagccaggcagtgggacggtcatccttttactgcctggaatatttcccatcgcagatgctgagaacgggcaataactttacctncagctacacttttgaggacgttcctttccacagcagctacgctcacagccagagcctggaccggctgatgaatcctctcatcgaccagtacctgtattacctgaacagaactcagaatcagtccggaagtgcccaaaacaaggacttgctgtttagccgtgggtctccaactggcatgtctgttcagcccaaaaactggctacctggaccctgttatcggcagcagcgcgtttctaaaacaaaaacagacaacaacaacagcaactttacctggactggtgcttcaaaatataaccttaatgggcgtgaatctataatcaaccctggcactgctatggcctcacacaaagacgacgaagacaagttctttcccatgagcggtgtcatgatttttggaaaggagagcgccggagcttcaaacactgcattggacaatgtcatgatcacagacgaagagannncnaagccactaaccccgtggccactgaaagatttgggactgtggcagtcaatctccaagcagcacannnaccctgcgaccgnagatgtgcatgccatgggagccttacctggaatggtgtggcaagacagagacgtatacctgcagggtcctatttgggccaaaattcctcacacggatggacactttcacccgtctcctctcatgggcggctttggacttaagcacccgcctcctcagatcctcatcaaaaacacgcctgttcctgcgaatcctccggcagagttttcggctacaaagtttgcttcattcatcacccagtattccacaggacaagtgagcgtggagattgaatgggagctgcagaaagaaaacagcaaacgctggaatcccgaagtgcagtatacatctaactatgcaaaatctgccaacgttgatttcactgtggacaacaatggactttatactgagcctcgccccattggcacccgttacctcacccgtccccngtaa

SEQ ID NO: 559 - protein, 723 aa, Artificial Sequence
  Description of Artificial Sequence: Synthetic polypeptide
MAADGYLPDWLEDNLSEGIREWWDLKPGAPKPKVNQQKQDNARGLVLPGYKYLGPFNGLDKGEPVNAADAAALEHDKAYDQQLKAGDNPYLRYNHADAEFQERLQEDTSFGGNLGRAVFQAKKRVLEPFGLVEEGAKTAPGKKRPVEQSPQEPDSSSGIGKTGQQPAKKRLNFGQTGDSESVPDPQPLGEPPATPAAVGPTTMASGGGAPMADNNEGADGVGNASGNWHCDSTWLGDRVITTSTRTWALPTYNNHLYKQISSASTGASNDNHYFGYSTPWGYFDFNRFHCHFSPRDWQRLINNNWGFRPKRLNFKLFNQVKETTDVTTIANNLTSTVQVFSDSEYQLPYVLGSAHQGCLPPFPADVFMIPQYGYLTLNNGSQAVGRSSFYCLEYFPSQMLRTGNNFTSYTFEDVPFHSSYAHSQSLDRLMNPLIDQYLYYLNRTQNQSGSAQNKDLLFSRGSPTGMSVQPKNWLPGPCYRQQRVSKTKTDNNNSNFTWTGASKYNLNGRESIINPGTAMASHKDDEDKFFPMSGVMIFGKESAGASNTALDNVMITDEEATNPVATERFGTVAVNLQSSPATDVHAMGALPGMVWQDRDVYLQGPIWAKIPHTDGHFHPSPLMGGFGLKHPPPQILIKNTPVPANPPAEFSATKFASFITQYSTGQVSVEIEWELQKENSKRWNPEVQYTSNYAKSANVDFTVDNNGLYTEPRPIGTRYLTRP

SEQ ID NO: 560 - DNA, 2208 bp, Artificial Sequence
  Description of Artificial Sequence: Synthetic polynucleotide
atggctgccgatggttatcttccagattggctcgaggacactctctctgaaggaataagacagtggtggaagctcaaacctggcccaccaccaccaaagcccgcagagcggcataaggacgacagcaggggtcttgtgcttcctgggtacaagtacctcggacccttcaacggactcgacaagggagagccggtcaacgaggcagacgccgcggccctcgagcacgacaaagcctatgaccggcagctcgacagcggagacaacccgtacctcaagtacaaccacgccgacgcggagtttcaggagcgccttaaagaagatacgtcttttgggggcaacctcggacgagcagtcttccaggcgaaaaagagggttcttgaacctctgggcctggttgaggaacctgttaagacggctccgggaaaaaagaggccggtagagcactctcctgtggagccagactcctcctcgggaaccggaaaggcgggtcagcagcctgcaagaaaaagattgaattttggtcagactggagacgcagactcagtacctgacccccagcctctcggacagccaccagcagccccctctggtctgggaactaatacgatggctacaggcagtggcgcaccaatggcagacaataacgagggcgccgacggagtgggtaattcctcgggaaattggcattgcgattccacatggatgggcgacagagtcatcaccaccagcacccgaacctgggccctgcccacctacaacaaccacctctacaaacaaatttccagccaatcaggagcctcgaacgacaatcactactttggctacagcaccccttgggggtattttgacttcaacagattccactgccacttttcaccacgtgactggcaaagactcatcaacaacaactggggattccgacccaagagactcaagttcaagctctttaacattcaagtcaaagaggtcacgcagaatgacggtacgacgacgattgccaataaccttaccagcacggttcaggtgtttactgactcggagtaccagctcccgtacgtcctcggctcggcgcatcaaggatgcctcccgccgttcccagcagacgtcttcatggtgccacagtatggatacctcaccctgaacaacgggagtcaggcagtaggacgctcttcattttactgcctggagtactttccttctcagatgctgcgtaccggtaacaactttaccttcagctacacttttgaggacgttcctttccacagcagctacgctcacagccagagtctggaccgtctcatgaatcctctcatcgaccagtacctgtattacttgagcagaacagacgctccaagtggaaccaccacgcagtcaaggcttcagttttctcaggccggagcgagtgacattcgggaccagtctaggaactggcttcctggaccctgttaccgccagcagcgagtatcaaagacatctgcggataacaacaacagtgaatactcgtggactggagctaccaagtaccacctcaatggcagagactctctggtgaatccgggcccggccatggcaagccacaaggacgatgaagaaaagttttttcctcagagcggggttctcatctttgggaagcaaggctcagagaaaacaagtgtggacattgaaaaggtcatgattacagacgaagaggaaatcaggacaaccaatcccgtggctacggagcagtatggttctgtatctaccaacctccagagaggcaacagacaagcagctaccgcagatgtcaacacacaaggcgttcttccaggcatggtctggcaggacagagatgtgtaccttcaggggcccatctgggcaaagattccacacacggacggacattttcacccctctcccctcatgggtggattcggacttaaacaccctcctccacagattctcatcaagaacaccccggtacctgcgaatccttcgaccaccttcagtgcggcaaagtttgcttccttcatcacacagtactccacgggacaggtcagcgtggagatcgagtgggagctgcagaaggaaaacagcaaacgctggaatcccgaagttcagtacacttccaactacaacaagtctgttaatgtggactttactgtggacactaatggcgtgtattcagagcctcgccccattggcaccagatacctgactcgtaatctgtaa

SEQ ID NO: 561 - protein, 735 aa, Artificial Sequence
  Description of Artificial Sequence: Synthetic polypeptide
MAADGYLPDWLEDTLSEGIRQWWKLKPGPPPPKPAERHKDDSRGLVLPGYKYLGPFNGLDKGEPVNEADAAALEHDKAYDRQLDSGDNPYLKYNHADAEFQERLKEDTSFGGNLGRAVFQAKKRVLEPLGLVEEPVKTAPGKKRPVEHSPVEPDSSSGTGKAGQQPARKRLNFGQTGDADSVPDPQPLGQPPAAPSGLGTNTMATGSGAPMADNNEGADGVGNSSGNWHCDSTWMGDRVITTSTRTWALPTYNNHLYKQISSQSGASNDNHYFGYSTPWGYFDFNRFHCHFSPRDWQRLINNNWGFRPKRLKFKLFNIQVKEVTQNDGTTTIANNLTSTVQVFTDSEYQLPYVLGSAHQGCLPPFPADVFMVPQYGYLTLNNGSQAVGRSSFYCLEYFPSQMLRTGNNFTFSYTFEDVPFHSSYAHSQSLDRLMNPLIDQYLYYLSRTDAPSGTTTQSRLQFSQAGASDIRDQSRNWLPGPCYRQQRVSKTSADNNNSEYSWTGATKYHLNGRDSLVNPGPAMASHKDDEEKFFPQSGVLIFGKQGSEKTSVDIEKVMITDEEEIRTTNPVATEQYGSVSTNLQRGNRQAATADVNTQGVLPGMVWQDRDVYLQGPIWAKIPHTDGHFHPSPLMGGFGLKHPPPQILIKNTPVPANPSTTFSAAKFASFITQYSTGQVSVEIEWELQKENSKRWNPEVQYTSNYNKSVNVDFTVDTNGVYSEPRPIGTRYLTRNL

SEQ ID NO: 562 - DNA, 2208 bp, Artificial Sequence
  Description of Artificial Sequence: Synthetic polynucleotide
atggctgccgatggttatcttccagattggctcgaggacactctctctgaaggaataagacagtggtggaagctcaaacctggcccaccaccaccaaagcccgcagagcggcataaggacgacagcaggggtcttgtgcttcctgggtacaagtacctcggacccttcaacggactcgacaagggagagccggtcaacgaggcagacgccgcggccctcgagcacgacaaagcctatgaccggcagctcgacagcggagacaacccgtacctcaagtacaaccacgccgacgcggagtttcaggagcgccttaaagaagatacgtcttttgggggcaacctcggacgagcagtcttccaggcgaaaaagagggttcttgaacctctgggcctggttgaggaacctgttaagacggctccgggaaaaaagaggccggtagagcactctcctgtggagccagactcctcctcgggaaccggaaaggcgggccagcagcctgcaagaaaaagattgaattttggtcagactggagacgcaaactcagtacctgacccccagcctctcggacagccaccagcagccccctctggtctgggaactaatacgatggctacaggcagtggcgcaccaatggcagacaataacgagggcgccgacggagtgggtaattcctcgggaaattggcattgcgattccacatggatgggcgacagagtcatcaccaccagcacccgaacctgggccctgcccacctacaacaaccacctctacaaacaaatttccagccaatcaggagcctcgaacgacaatcactactttggctacagcaccccttgggggtattttgacttcaacagattccactgccacttttcaccacgtgactggcaaagactcatcaacaacaactggggattccgacccaagagactcaagttcaagctctttaacattcaagtcaaagaggtcacgcagaatgacggtacgacgacgattgccaataaccttaccagcacggttcaggtgtttactgactcggagtaccagctcccgtacgtcctcggctcggcgcatcaaggatgcctcccgccgttcccagcagacgtcttcatggtgccacagtatggatacctcaccctgaacaacgggagtcgggcagtaggacgctcttcattttactgcctggagtactttccttctcagatgctgcgtaccggtaacaactttaccttcagctacacttttgaggacgttcctttccacagcagctacgctcacagccagagtctggaccgtctcatgaatcctctcatcgaccagtacctgtattacttgagcagaacagacactccaagtggaaccaccacgcagtcaaggcttcagttttctcaggccggagcgagtgacattcgggaccagtctaggaactggcttcctggaccctgttaccgccagcagcgagtatcaaagacatctgcggataacaacaacagtgaatactcgtggactggagctaccaagtaccacctcaatggcagagactctctggtgaatccgggcccggccatggcaagccacaaggacgatgaagaaaagttttttcctcagagcggggttctcatctttgggaagcaaggctcagagaaaacaagtgtggacattgaaaaggtcatgattacagacgaagaggaaatcaggacgaccaatcccgtggctacggagcagtatggttctgtatctaccaacctccagagaggcaacagacaagcagctaccgcagatgtcaacacacaaggcgttcttccaggcatggtctggcaggacagagatgtgtaccttcaggggcccatctgggcaaagattccacacacggacggacattttcacccctctcccctcatgggtggattcggacttaaacaccctcctccacagattctcatcaagaacaccccggtacctgcgaatccttcgaccaccttcagtgcggcaaagtttgcttccttcatcacacagtactccacgggacaggtcagcgtggagatcgagtgggagctgcagaaggaaaacagcaaacgctggaatcccgaagttcagtacacttccaactacaacaagtctgttaatgtggactttactgtggacactaatggcgtgtatacagagcctcgccccattggcaccagatacctgactcgtaatctgtaa

SEQ ID NO: 563 - protein, 735 aa, Artificial Sequence
  Description of Artificial Sequence: Synthetic polypeptide
MAADGYLPDWLEDTLSEGIRQWWKLKPGPPPPKPAERHKDDSRGLVLPGYKYLGPFNGLDKGEPVNEADAAALEHDKAYDRQLDSGDNPYLKYNHADAEFQERLKEDTSFGGNLGRAVFQAKKRVLEPLGLVEEPVKTAPGKKRPVEHSPVEPDSSSGTGKAGQQPARKRLNFGQTGDANSVPDPQPLGQPPAAPSGLGTNTMATGSGAPMADNNEGADGVGNSSGNWHCDSTWMGDRVITTSTRTWALPTYNNHLYKQISSQSGASNDNHYFGYSTPWGYFDFNRFHCHFSPRDWQRLINNNWGFRPKRLKFKLFNIQVKEVTQNDGTTTIANNLTSTVQVFTDSEYQLPYVLGSAHQGCLPPFPADVFMVPQYGYLTLNNGSRAVGRSSFYCLEYFPSQMLRTGNNFTFSYTFEDVPFHSSYAHSQSLDRLMNPLIDQYLYYLSRTDTPSGTTTQSRLQFSQAGASDIRDQSRNWLPGPCYRQQRVSKTSADNNNSEYSWTGATKYHLNGRDSLVNPGPAMASHKDDEEKFFPQSGVLIFGKQGSEKTSVDIEKVMITDEEEIRTTNPVATEQYGSVSTNLQRGNRQAATADVNTQGVLPGMVWQDRDVYLQGPIWAKIPHTDGHFHPSPLMGGFGLKHPPPQILIKNTPVPANPSTTFSAAKFASFITQYSTGQVSVEIEWELQKENSKRWNPEVQYTSNYNKSVNVDFTVDTNGVYTEPRPIGTRYLTRNL

SEQ ID NO: 564 - DNA, 2211 bp, Artificial Sequence
  Description of Artificial Sequence: Synthetic polynucleotide
atggctgccgatggttatcttccagattggctcgaggacactctctctgaaggaataagacagtggtggaagctcaaacctggcccaccaccaccaaagcccgcagagcggcataaggacgacagcaggggtcttgtgcttcctgggtacaagtacctcggacccttcaacggactcgacaagggagagccggtcaacgaggcagacgccgcggccctcgagcacgacaaggcctacgaccagcagctcaaagcgggtgacaatccgtacctgcggtataaccacgccgacgccgagtttcaggagcgtctgcaagaagatacgtcttttgggggcaacctcgggcgagcagtcttccaggccaagaagcgggttctcgaacctctcggtctggttgaggaaggcgctaagacggctcctggaaagaaacgtccggtagagcagtcgccacaagagccagactcctcctcgggcatcggcaagacaggccagcagcccgctaaaaagagactcaattttggtcagactggcgactcagagtcagtccccgacccacaacctctcggagaacctccagcaacccccgctgctgtgggacctactacaatggcttcaggcggtggcgcaccaatggcagacaataacgaaggcgccgacggagtgggtaatgcctcaggaaattggcattgcgattccacatggctgggcgacagagtcatcaccaccagcacccgaacatgggccttgcccacctataacaaccacctctacaagcaaatctccagtgcttcgacgggggccagcaacgacaaccactacttcggctacagcaccccctgggggtattttgactttaacagattccactgccacttttcaccacgtgactggcagcgactcatcaacaataactggggattccggcccaagagactcagcttcaagctcttcaacatccaggtcaaggaggtcacgacgaatgatggcgtcacaaccatcgctaataaccttaccagcacggttcaagtcttctcggactcggagtaccagcttccgtacgtcctcggctctgcgcaccagggctgcctccctccgttcccggcggacgtgttcatgattccgcaatacggctacctgacgctcaacaatggcagccaagccgtgggacgttcatccttttactgcctggaatatttcccttctcagatgctgagaacgggcaacaactttaccttcagctacacctttgaggaagtgcctttccacagcagctacgcgcacagccagagcctggaccggctgatgaatcctctcatcgatcaatacctgtattacctgaacagaactcaaaatcagtccggaagtgcccaaaacaaggacttgctgtttagccgtgggtctccagctggcatgtctgttcagcccaaaaactggctacctggaccctgttatcggcagcagcgcgtttctaaaacaaaaacagacaacaacaacagcaattttacctggactggtgcttcaaaatataacctcaatgggcgtgaatccatcatcaaccctggcactgctatggcctcacacaaagacgacgaagacaagttctttcccatgagcggtgtcatgatttttggaaaagagagcgccggagcttcaaacactgcattggacaatgtcatgattacggacgaagaggaaattaaagccactaaccctgtggccaccgaaagatttgggaccgtggcagtcaatttccagagcagcagcacagaccctgcgaccggagatgtgcatgctatgggagcattacctggcatggtgtggcaagatagagacgtgtacctgcagggtcccatttgggccaaaattcctcacacagatggacactttcacccgtctcctcttatgggcggctttggactcaagaacccgcctcctcagatcctcatcaaaaacacgcctgttcctgcgaatcctccggcggagttttcagctacaaagtttgcttcattcatcactcaatactccacaggacaagtgagcgtggaaattgaatgggagctgcagaaagaaaacagcaaacgctggaatcccgaagtgcagtatacatctaactatgcaaaatctgccaacgttgatttcactgtggacaacaatggactttatactgagcctcgccccattggcacccgttacctcacccgtcccctgtaa

SEQ ID NO: 565 - protein, 736 aa, Artificial Sequence
  Description of Artificial Sequence: Synthetic polypeptide
MAADGYLPDWLEDTLSEGIRQWWKLKPGPPPPKPAERHKDDSRGLVLPGYKYLGPFNGLDKGEPVNEADAAALEHDKAYDQQLKAGDNPYLRYNHADAEFQERLQEDTSFGGNLGRAVFQAKKRVLEPLGLVEEGAKTAPGKKRPVEQSPQEPDSSSGIGKTGQQPAKKRLNFGQTGDSESVPDPQPLGEPPATPAAVGPTTMASGGGAPMADNNEGADGVGNASGNWHCDSTWLGDRVITTSTRTWALPTYNNHLYKQISSASTGASNDNHYFGYSTPWGYFDFNRFHCHFSPRDWQRLINNNWGFRPKRLSFKLFNIQVKEVTTNDGVTTIANNLTSTVQVFSDSEYQLPYVLGSAHQGCLPPFPADVFMIPQYGYLTLNNGSQAVGRSSFYCLEYFPSQMLRTGNNFTFSYTFEEVPFHSSYAHSQSLDRLMNPLIDQYLYYLNRTQNQSGSAQNKDLLFSRGSPAGMSVQPKNWLPGPCYRQQRVSKTKTDNNNSNFTWTGASKYNLNGRESIINPGTAMASHKDDEDKFFPMSGVMIFGKESAGASNTALDNVMITDEEEIKATNPVATERFGTVAVNFQSSSTDPATGDVHAMGALPGMVWQDRDVYLQGPIWAKIPHTDGHFHPSPLMGGFGLKNPPPQILIKNTPVPANPPAEFSATKFASFITQYSTGQVSVEIEWELQKENSKRWNPEVQYTSNYAKSANVDFTVDNNGLYTEPRPIGTRYLTRPL

SEQ ID NO: 566 - protein, 735 aa, Artificial Sequence
  Description of Artificial Sequence: Synthetic polypeptide
MAADGYLPDWLEDTLSEGIRQWWKLKPGPPPPKPAERHKDDSRGLVLPGYKYLGPFNGLDKGEPVNEADAAALEHDKAYDRQLDSGDNPYLKYNHADAEFQERLKEDTSFGGNLGRAVFQAKKRVLEPLGLVEEPVKTAPGKKRPVEHSPVEPDSSSGTGKAGQQPARKRLNFGQTGDADSVPDPQPLGQPPAAPSGLGTNTMATGSGAPMADNNEGADGVGNSSGNWHCDSTWMGDRVITTSTRTWALPTYNNHLYKQISSQSGASNDNHYFGYSTPWGYFDFNRFHCHFSPRDWQRLINNNWGFRPKRLKFKLFNIQVKEVTQNDGTTTIANNLTSTVQVFTDSEYQLPYVLGSAHQGCLPPFPADVFMVPQYGYLTLNNGSQAVGRSSFYCLEYFPSQMLRTGNNFTFSYTFEDVPFHSSYAHSQSLDRLMNPLIDQYLYYLSRTDTPSGTTTQSRLQFSQAGASDIRNQSRNWLPGPCYRQQRVSKTSADNNNSEYSWTGATKYHLNGRDSLVNPGPAMASHKDDEEKFFPQSGVLIFGKQGSEKTSVDIEKVMITDEEEIRTTNPVATEQYGSVSTNLQRGNRQAATADVNTQGVLPGMVWQDRDVYLQGPIWAKIPHTDGHFHPSPLMGGFGLKHPPPQILIKNTPVPANPSTTFSAAKFASFITQYSTGQVSVEIEWELQKENSKRWNPEVQYTSNYNKSVNVDFTVDTNGVYSEPRPIGTRYLTRNQ

SEQ ID NO: 567 - DNA, 2208 bp, Artificial Sequence
  Description of Artificial Sequence: Synthetic polynucleotide
atggctgccgatggttatcttccagattggctcgaggacactctctctgaaggaataagacagtggtggaagctcaaacctggcccaccaccaccaaagcccgcagagcggcataaggacgacagcaggggtcttgtgcttcctgggtacaagtacctcggacccttcaacggactcgacaagggagagccggtcaacgaggcagacgccgcggccctcgagcacgacaaagcctatgaccggcagctcgacagcggagacaacccgtacctcaagtacaaccacgccgacgcggagtttcaggaacgccttaaagaagatacgtcttttgggggcaacctcggacgagcagtcttccaggcgaaaaagagggttcttgaacctctgggcctggttgaggaacctgttaagacggctccgggaaaaaagaggccggtagagcactctcctgtggagccagactcctcctcgggaaccggaaaggcgggccagcagcctgcaagaaaaagattgaattttggtcagactggagacgcagactcagtacctgacccccagcctctcggacagccaccagcagccccctctggtctgggaactaatacgatggctacaggcagtggcgcaccaatggcagacaataacgagggcgccgacggagtgggtaattcctcgggaaattggcattgcgattccacatggatgggcgacagagtcatcaccaccagcacccgaacctgggccctgcccacctacaacaaccacctctacaaacaaatttccagccaatcaggagcctcgaacgacaatcactactttggctacagcaccccttgggggtattttgacttcaacagattccactgccacttttcaccacgtgactggcaaagactcatcaacaacaactggggattccgacccaagagactcaagttcaagctctttaacattcaagtcaaagaggtcacgcagaatgacggtacgacgacgattgccaataaccttaccagcacggttcaggtgtttactgactcggagtaccagctcccgtacgtcctcggctcggcgcatcaaggatgcctcccgccgttcccagcagacgtcttcatggtgccacagtatggatacctcaccctgaacaacgggagtcaggcagtaggacgctcttcattttactgcctggagtactttccttctcagatgctgcgtaccggtaacaactttaccttcagctacacttttgaggacgttcctttccacagcagctacgctcacagccagagtctggaccgtctcatgaatcctctcatcgaccagtacctgtattacttgagcagaacagacactccaagtggaaccaccacgcagtcaaggcttcagttttctcaggccggagcgagtgacattcggaaccagtctaggaactggcttcctggaccctgttaccgccagcagcgagtatcaaagacatctgcggataacaacaacagtgaatactcgtggactggagctaccaagtaccacctcaatggcagagactctctggtgaatccgggcccggccatggcaagccacaaggacgatgaagaaaagttttttcctcagagcggggttctcatctttgggaagcaaggctcagagaaaacaagtgtggacattgaaaaggtcatgattacagacgaagaggaaatcaggacaaccaatcccgtggctacggagcagtatggttctgtatctaccaacctccagagaggcaacagacaagcagctaccgcagatgtcaacacacaaggcgttcttccaggcatggtctggcaggacagagatgtgtaccttcaggggcccatctgggcaaagattccacacacggacggacattttcacccctctcccctcatgggtggattcggacttaaacaccctcctccacagattctcatcaagaacaccccggtacctgcgaatccttcgaccaccttcagtgcggcaaagtttgcttccttcatcacacagtactccacgggacaggtcagcgtggagatcgagtgggagctgcagaaggaaaacagcaaacgctggaatcccgaagttcagtacacttccaactacaacaagtctgttaatgtggactttactgtggacactaatggcgtgtattcagagcctcgccccattggcaccagatacctgactcgtaatcagtaa

SEQ ID NO: 568 - DNA, 2208 bp, Artificial Sequence
  Description of Artificial Sequence: Synthetic polynucleotide
atggctgccgatggttatcttccagattggctcgaggacactctctctgaaggaataagacagtggtggaagctcaaacctggcccaccaccaccaaagcccgcagagcggcataaggacgacagcaggggtcttgtgcttcctgggtacaagtacctcggacccttcaacggactcgacaagggagagccggtcaacgaggcagacgccgcggccctcgagcacgacaaagcctatgaccggcagctcgacagcggagacaacccgtacctcaagtacaaccacgccgacgcggagtttcaggagcgccttaaagaagatacgtcttttgggggcaacctcggacgagcagtcttccaggcgaaaaagagggttcttgaacctctgggcctggttgaggaacctgttaagacggctccgggaaaaaagaggccggtagagcactctcctgtggagccagactcctcctcgggaaccggaaaggcgggccagcagcctgcaagaaaaagattgaattttggtcagactggagacgcagactcagtacctgatccccagcctctcggacagccaccagcagccccctctggtctgggaactaatacgatggctacaggcagtggcgcaccaatggcagacaataacgagggcgccgacggagtgggtaattcctcgggaaattggcattgcgattccacatggatgggcgacagagtcatcaccaccagcacccgaacctgggccctgcccacctacaacaaccacctctacaaacaaatttccagccaatcaggagcctcgaacgacaatcactactttggctacagcaccccttgggggtattttgacttcaacagattccactgccacttttcaccacgtgactggcaaagactcatcaacaacaactggggattccgacccaagagactcaagttcaagctctttaacattcaagtcaaagaggtcacgcagaatgacggtacgacgacgattgccaataaccttaccagcacggttcaggtgtttactgactcggagtaccagctcccgtatgtcctcggctcggcgcatcaaggatgcctcccgccgttcccagcagacgtcttcatggtgccacagtatggatacctcaccctgaacaacgggagtcaggcagtaggacgctcttcattttactgcctggagtactttccttctcagatgctgcgtaccggtaacaactttaccttcagctacacttttgaggacgttcctttccacagcagctacgctcacagccagagtctggaccgtctcatgaatcctctcatcgaccagtacctgtattacttgagcagaacagacactccaagtggaaccaccacgcagtcaaggcttcagttttctcaggccggagcgagtgacattcgggaccagtctaggaactggcttcctggaccctgttaccgccagcagcgagtatcaaagacatctgcggataacaacaacagtgaatactcgtggactggagctaccaagtaccacctcaatggcagagactctctggtgaatccgggcccggccatggcaagccacaaggacgatgaagaaaagttttttcctcagagcggggttctcatctttgggaagcaaggctcagagaaaacaagtgtggacattgaaaaggtcatgattacagacgaagaggaaatcaggacaaccaatcccgtggctacggagcagtatggttctgtatctaccaacctccagagaggcaacagacaagcagctaccgcagatgtcaacacacaaggcgttcttccaggcatggtctggcaggacagagatgtgtaccttcaggggcccatctgggcaaagattccacacacggacggacattttcacccctctcccctcatgggtggattcggacttaaacaccctcctccacagattctcatcaagaacaccccggtacctgcgaatccttcgaccaccttcagtgcggcaaagtttgcttccttcatcacacagtactccacgggacaggtcagcgtggagatcgagtgggagctgcagaaggaaaacagcaaacgctggaatcccgaagttcagtacacttccaactacaacaagtctgttaatgtggactttactgtggacactaatggcgtgtattcagagcctcgccccattggcaccagatacctgactcgtaatctgtaa

SEQ ID NO: 569 - protein, 735 aa, Artificial Sequence
  Description of Artificial Sequence: Synthetic polypeptide
MAADGYLPDWLEDTLSEGIRQWWKLKPGPPPPKPAERHKDDSRGLVLPGYKYLGPFNGLDKGEPVNEADAAALEHDKAYDRQLDSGDNPYLKYNHADAEFQERLKEDTSFGGNLGRAVFQAKKRVLEPLGLVEEPVKTAPGKKRPVEHSPVEPDSSSGTGKAGQQPARKRLNFGQTGDADSVPDPQPLGQPPAAPSGLGTNTMATGSGAPMADNNEGADGVGNSSGNWHCDSTWMGDRVITTSTRTWALPTYNNHLYKQISSQSGASNDNHYFGYSTPWGYFDFNRFHCHFSPRDWQRLINNNWGFRPKRLKFKLFNIQVKEVTQNDGTTTIANNLTSTVQVFTDSEYQLPYVLGSAHQGCLPPFPADVFMVPQYGYLTLNNGSQAVGRSSFYCLEYFPSQMLRTGNNFTFSYTFEDVPFHSSYAHSQSLDRLMNPLIDQYLYYLSRTDTPSGTTTQSRLQFSQAGASDIRDQSRNWLPGPCYRQQRVSKTSADNNNSEYSWTGATKYHLNGRDSLVNPGPAMASHKDDEEKFFPQSGVLIFGKQGSEKTSVDIEKVMITDEEEIRTTNPVATEQYGSVSTNLQRGNRQAATADVNTQGVLPGMVWQDRDVYLQGPIWAKIPHTDGHFHPSPLMGGFGLKHPPPQILIKNTPVPANPSTTFSAAKFASFITQYSTGQVSVEIEWELQKENSKRWNPEVQYTSNYNKSVNVDFTVDTNGVYSEPRPIGTRYLTRNL

SEQ ID NO: 570 - DNA, 6119 bp, Artificial Sequence
  Description of Artificial Sequence: Synthetic polynucleotide
gacggatcgggagatctcccgatcccctatggtgcactctcagtacaatctgctctgatgccgcatagttaagccagtatctgctccctgcttgtgtgttggaggtcgctgagtagtgcgcgagcaaaatttaagctacaacaaggcaaggcttgaccgacaattgcatgaagaatctgcttagggttaggcgttttgcgctgcttcgcgatgtacgggccagatatacgcgttgacattgattattgactagttattaatagtaatcaattacggggtcattagttcatagcccatatatggagttccgcgttacataacttacggtaaatggcccgcctggctgaccgcccaacgacccccgcccattgacgtcaataatgacgtatgttcccatagtaacgccaatagggactttccattgacgtcaatgggtggagtatttacggtaaactgcccacttggcagtacatcaagtgtatcatatgccaagtacgccccctattgacgtcaatgacggtaaatggcccgcctggcattatgcccagtacatgaccttatgggactttcctacttggcagtacatctacgtattagtcatcgctattaccatggtgatgcggttttggcagtacatcaatgggcgtggatagcggtttgactcacggggatttccaagtctccaccccattgacgtcaatgggagtttgttttggcaccaaaatcaacgggactttccaaaatgtcgtaacaactccgccccattgacgcaaatgggcggtaggcgtgtacggtgggaggtctatataagcagagctctctggctaactagagaacccactgcttactggcttatcgaaattaatacgactcactatagggagacccaagctggctagcgtttaaacttaagcttggtaccgagctcggatccatgtggactctcgggcgccgcgcagtagccggcctcctggcgtcacccagcccagcccaggcccagaccctcacccgggtcccgcggccggcagagttggccccactctgcggccgccgtggcctgcgcaccgacatcgatgcgacctgcacgccccgccgcgcaagttcgaaccaacgtggcctcaaccagatttggaatgtcaaaaagcagagtgtctatttgatgaatttgaggaaatctggaactttgggccacccaggctctctagatgagaccacctatgaaagactagcagaggaaacgctggactctttagcagagttttttgaagaccttgcagacaagccatacacgtttgaggactatgatgtctcctttgggagtggtgtcttaactgtcaaactgggtggagatctaggaacctatgtgatcaacaagcagacgccaaacaagcaaatctggctatcttctccatccagtggacctaagcgttatgactggactgggaaaaactgggtgtactcccacgacggcgtgtccctccatgagctgctggccgcagagctcactaaagccttaaaaaccaaactggacttgtcttccttggcctattccggaaaagatgctggatccgactacaaagaccatgacggtgattataaagatcatgacatcgactacaaggatgacgatgacaagggatccgaacaaaaactcatctcagaagaggatctgtagctcgagtctagagggcccgtttaaacccgctgatcagcctcgactgtgccttctagttgccagccatctgttgtttgcccctcccccgtgccttccttgaccctggaaggtgccactcccactgtcctttcctaataaaatgaggaaattgcatcgcattgtctgagtaggtgtcattctattctggggggtggggtggggcaggacagcaagggggaggattgggaagacaatagcaggcatgctggggatgcggtgggctctatggcttctgaggcggaaagaaccagctggggctctagggggtatccccacgcgccctgtagcggcgcattaagcgcggcgggtgtggtggttacgcgcagcgtgaccgctacacttgccagcgccctagcgcccgctcctttcgctttcttcccttcctttctcgccacgttcgccggctttccccgtcaagctctaaatcgggggctccctttagggttccgatttagtgctttacggcacctcgaccccaaaaaacttgattagggtgatggttcacgtagtgggccatcgccctgatagacggtttttcgccctttgacgttggagtccacgttctttaatagtggactcttgttccaaactggaacaacactcaaccctatctcggtctattcttttgatttataagggattttgccgatttcggcctattggttaaaaaatgagctgatttaacaaaaatttaacgcgaattaattctgtggaatgtgtgtcagttagggtgtggaaagtccccaggctccccagcaggcagaagtatgcaaagcatgcatctcaattagtcagcaaccaggtgtggaaagtccccaggctccccagcaggcagaagtatgcaaagcatgcatctcaattagtcagcaaccatagtcccgcccctaactccgcccatcccgcccctaactccgcccagttccgcccattctccgccccatggctgactaattttttttatttatgcagaggccgaggccgcctctgcctctgagctattccagaagtagtgaggaggcttttttggaggcctaggcttttgcaaaaagctcccgggagcttgtatatccattttcggatctgatcaagagacaggatgaggatcgtttcgcatgattgaacaagatggattgcacgcaggttctccggccgcttgggtggagaggctattcggctatgactgggcacaacagacaatcggctgctctgatgccgccgtgttccggctgtcagcgcaggggcgcccggttctttttgtcaagaccgacctgtccggtgccctgaatgaactgcaggacgaggcagcgcggctatcgtggctggccacgacgggcgttccttgcgcagctgtgctcgacgttgtcactgaagcgggaagggactggctgctattgggcgaagtgccggggcaggatctcctgtcatctcaccttgctcctgccgagaaagtatccatcatggctgatgcaatgcggcggctgcatacgcttgatccggctacctgcccattcgaccaccaagcgaaacatcgcatcgagcgagcacgtactcggatggaagccggtcttgtcgatcaggatgatctggacgaagagcatcaggggctcgcgccagccgaactgttcgccaggctcaaggcgcgcatgcccgacggcgaggatctcgtcgtgacccatggcgatgcctgcttgccgaatatcatggtggaaaatggccgcttttctggattcatcgactgtggccggctgggtgtggcggaccgctatcaggacatagcgttggctacccgtgatattgctgaagagcttggcggcgaatgggctgaccgcttcctcgtgctttacggtatcgccgctcccgattcgcagcgcatcgccttctatcgccttcttgacgagttcttctgagcgggactctggggttcgaaatgaccgaccaagcgacgcccaacctgccatcacgagatttcgattccaccgccgccttctatgaaaggttgggcttcggaatcgttttccgggacgccggctggatgatcctccagcgcggggatctcatgctggagttcttcgcccaccccaacttgtttattgcagcttataatggttacaaataaagcaatagcatcacaaatttcacaaataaagcatttttttcactgcattctagttgtggtttgtccaaactcatcaatgtatcttatcatgtctgtataccgtcgacctctagctagagcttggcgtaatcatggtcatagctgtttcctgtgtgaaattgttatccgctcacaattccacacaacatacgagccggaagcataaagtgtaaagcctggggtgcctaatgagtgagctaactcacattaattgcgttgcgctcactgcccgctttccagtcgggaaacctgtcgtgccagctgcattaatgaatcggccaacgcgcggggagaggcggtttgcgtattgggcgctcttccgcttcctcgctcactgactcgctgcgctcggtcgttcggctgcggcgagcggtatcagctcactcaaaggcggtaatacggttatccacagaatcaggggataacgcaggaaagaacatgtgagcaaaaggccagcaaaaggccaggaaccgtaaaaaggccgcgttgctggcgtttttccataggctccgcccccctgacgagcatcacaaaaatcgacgctcaagtcagaggtggcgaaacccgacaggactataaagataccaggcgtttccccctggaagctccctcgtgcgctctcctgttccgaccctgccgcttaccggatacctgtccgcctttctcccttcgggaagcgtggcgctttctcatagctcacgctgtaggtatctcagttcggtgtaggtcgttcgctccaagctgggctgtgtgcacgaaccccccgttcagcccgaccgctgcgccttatccggtaactatcgtcttgagtccaacccggtaagacacgacttatcgccactggcagcagccactggtaacaggattagcagagcgaggtatgtaggcggtgctacagagttcttgaagtggtggcctaactacggctacactagaagaacagtatttggtatctgcgctctgctgaagccagttaccttcggaaaaagagttggtagctcttgatccggcaaacaaaccaccgctggtagcggtttttttgtttgcaagcagcagattacgcgcagaaaaaaaggatctcaagaagatcctttgatcttttctacggggtctgacgctcagtggaacgaaaactcacgttaagggattttggtcatgagattatcaaaaaggatcttcacctagatccttttaaattaaaaatgaagttttaaatcaatctaaagtatatatgagtaaacttggtctgacagttaccaatgcttaatcagtgaggcacctatctcagcgatctgtctatttcgttcatccatagttgcctgactccccgtcgtgtagataactacgatacgggagggcttaccatctggccccagtgctgcaatgataccgcgagacccacgctcaccggctccagatttatcagcaataaaccagccagccggaagggccgagcgcagaagtggtcctgcaactttatccgcctccatccagtctattaattgttgccgggaagctagagtaagtagttcgccagttaatagtttgcgcaacgttgttgccattgctacaggcatcgtggtgtcacgctcgtcgtttggtatggcttcattcagctccggttcccaacgatcaaggcgagttacatgatcccccatgttgtgcaaaaaagcggttagctccttcggtcctccgatcgttgtcagaagtaagttggccgcagtgttatcactcatggttatggcagcactgcataattctcttactgtcatgccatccgtaagatgcttttctgtgactggtgagtactcaaccaagtcattctgagaatagtgtatgcggcgaccgagttgctcttgcccggcgtcaatacgggataataccgcgccacatagcagaactttaaaagtgctcatcattggaaaacgttcttcggggcgaaaactctcaaggatcttaccgctgttgagatccagttcgatgtaacccactcgtgcacccaactgatcttcagcatcttttactttcaccagcgtttctgggtgagcaaaaacaggaaggcaaaatgccgcaaaaaagggaataagggcgacacggaaatgttgaatactcatactcttcctttttcaatattattgaagcatttatcagggttattgtctcatgagcggatacatatttgaatgtatttagaaaaataaacaaataggggttccgcgcacatttccccgaaaagtgccacctgacgtc

SEQ ID NO: 571 - DNA, 6011 bp, Artificial Sequence
  Description of Artificial Sequence: Synthetic polynucleotide
gacggatcgggagatctcccgatcccctatggtgcactctcagtacaatctgctctgatgccgcatagttaagccagtatctgctccctgcttgtgtgttggaggtcgctgagtagtgcgcgagcaaaatttaagctacaacaaggcaaggcttgaccgacaattgcatgaagaatctgcttagggttaggcgttttgcgctgcttcgcgatgtacgggccagatatacgcgttgacattgattattgactagttattaatagtaatcaattacggggtcattagttcatagcccatatatggagttccgcgttacataacttacggtaaatggcccgcctggctgaccgcccaacgacccccgcccattgacgtcaataatgacgtatgttcccatagtaacgccaatagggactttccattgacgtcaatgggtggagtatttacggtaaactgcccacttggcagtacatcaagtgtatcatatgccaagtacgccccctattgacgtcaatgacggtaaatggcccgcctggcattatgcccagtacatgaccttatgggactttcctacttggcagtacatctacgtattagtcatcgctattaccatggtgatgcggttttggcagtacatcaatgggcgtggatagcggtttgactcacggggatttccaagtctccaccccattgacgtcaatgggagtttgttttggcaccaaaatcaacgggactttccaaaatgtcgtaacaactccgccccattgacgcaaatgggcggtaggcgtgtacggtgggaggtctatataagcagagctctctggctaactagagaacccactgcttactggcttatcgaaattaatacgactcactatagggagacccaagctggctagcgtttaaacttaagcttggtaccgagctcggatccatgtggactctcgggcgccgcgcagtagccggcctcctggcgtcacccagcccagcccaggcccagaccctcacccgggtcccgcggccggcagagttggccccactctgcggccgccgtggcctgcgcaccgacatcgatgcgacctgcacgccccgccgcgcaagttcgaaccaacgtggcctcaaccagatttggaatgtcaaaaagcagagtgtctatttgatgaatttgaggaaatctggaactttgggccacccaggctctctagatgagaccacctatgaaagactagcagaggaaacgctggactctttagcagagttttttgaagaccttgcagacaagccatacacgtttgaggactatgatgtctcctttgggagtggtgtcttaactgtcaaactgggtggagatctaggaacctatgtgatcaacaagcagacgccaaacaagcaaatctggctatcttctccatccagtggacctaagcgttatgactggactgggaaaaactgggtgtactcccacgacggcgtgtccctccatgagctgctggccgcagagctcactaaagccttaaaaaccaaactggacttgtcttccttggcctattccggaaaagatgcttgactcgagtctagagggcccgtttaaacccgctgatcagcctcgactgtgccttctagttgccagccatctgttgtttgcccctcccccgtgccttccttgaccctggaaggtgccactcccactgtcctttcctaataaaatgaggaaattgcatcgcattgtctgagtaggtgtcattctattctggggggtggggtggggcaggacagcaagggggaggattgggaagacaatagcaggcatgctggggatgcggtgggctctatggcttctgaggcggaaagaaccagctggggctctagggggtatccccacgcgccctgtagcggcgcattaagcgcggcgggtgtggtggttacgcgcagcgtgaccgctacacttgccagcgccctagcgcccgctcctttcgctttcttcccttcctttctcgccacgttcgccggctttccccgtcaagctctaaatcgggggctccctttagggttccgatttagtgctttacggcacctcgaccccaaaaaacttgattagggtgatggttcacgtagtgggccatcgccctgatagacggtttttcgccctttgacgttggagtccacgttctttaatagtggactcttgttccaaactggaacaacactcaaccctatctcggtctattcttttgatttataagggattttgccgatttcggcctattggttaaaaaatgagctgatttaacaaaaatttaacgcgaattaattctgtggaatgtgtgtcagttagggtgtggaaagtccccaggctccccagcaggcagaagtatgcaaagcatgcatctcaattagtcagcaaccaggtgtggaaagtccccaggctccccagcaggcagaagtatgcaaagcatgcatctcaattagtcagcaaccatagtcccgcccctaactccgcccatcccgcccctaactccgcccagttccgcccattctccgccccatggctgactaattttttttatttatgcagaggccgaggccgcctctgcctctgagctattccagaagtagtgaggaggcttttttggaggcctaggcttttgcaaaaagctcccgggagcttgtatatccattttcggatctgatcaagagacaggatgaggatcgtttcgcatgattgaacaagatggattgcacgcaggttctccggccgcttgggtggagaggctattcggctatgactgggcacaacagacaatcggctgctctgatgccgccgtgttccggctgtcagcgcaggggcgcccggttctttttgtcaagaccgacctgtccggtgccctgaatgaactgcaggacgaggcagcgcggctatcgtggctggccacgacgggcgttccttgcgcagctgtgctcgacgttgtcactgaagcgggaagggactggctgctattgggcgaagtgccggggcaggatctcctgtcatctcaccttgctcctgccgagaaagtatccatcatggctgatgcaatgcggcggctgcatacgcttgatccggctacctgcccattcgaccaccaagcgaaacatcgcatcgagcgagcacgtactcggatggaagccggtcttgtcgatcaggatgatctggacgaagagcatcaggggctcgcgccagccgaactgttcgccaggctcaaggcgcgcatgcccgacggcgaggatctcgtcgtgacccatggcgatgcctgcttgccgaatatcatggtggaaaatggccgcttttctggattcatcgactgtggccggctgggtgtggcggaccgctatcaggacatagcgttggctacccgtgatattgctgaagagcttggcggcgaatgggctgaccgcttcctcgtgctttacggtatcgccgctcccgattcgcagcgcatcgccttctatcgccttcttgacgagttcttctgagcgggactctggggttcgaaatgaccgaccaagcgacgcccaacctgccatcacgagatttcgattccaccgccgccttctatgaaaggttgggcttcggaatcgttttccgggacgccggctggatgatcctccagcgcggggatctcatgctggagttcttcgcccaccccaacttgtttattgcagcttataatggttacaaataaagcaatagcatcacaaatttcacaaataaagcatttttttcactgcattctagttgtggtttgtccaaactcatcaatgtatcttatcatgtctgtataccgtcgacctctagctagagcttggcgtaatcatggtcatagctgtttcctgtgtgaaattgttatccgctcacaattccacacaacatacgagccggaagcataaagtgtaaagcctggggtgcctaatgagtgagctaactcacattaattgcgttgcgctcactgcccgctttccagtcgggaaacctgtcgtgccagctgcattaatgaatcggccaacgcgcggggagaggcggtttgcgtattgggcgctcttccgcttcctcgctcactgactcgctgcgctcggtcgttcggctgcggcgagcggtatcagctcactcaaaggcggtaatacggttatccacagaatcaggggataacgcaggaaagaacatgtgagcaaaaggccagcaaaaggccaggaaccgtaaaaaggccgcgttgctggcgtttttccataggctccgcccccctgacgagcatcacaaaaatcgacgctcaagtcagaggtggcgaaacccgacaggactataaagataccaggcgtttccccctggaagctccctcgtgcgctctcctgttccgaccctgccgcttaccggatacctgtccgcctttctcccttcgggaagcgtggcgctttctcatagctcacgctgtaggtatctcagttcggtgtaggtcgttcgctccaagctgggctgtgtgcacgaaccccccgttcagcccgaccgctgcgccttatccggtaactatcgtcttgagtccaacccggtaagacacgacttatcgccactggcagcagccactggtaacaggattagcagagcgaggtatgtaggcggtgctacagagttcttgaagtggtggcctaactacggctacactagaagaacagtatttggtatctgcgctctgctgaagccagttaccttcggaaaaagagttggtagctcttgatccggcaaacaaaccaccgctggtagcggtttttttgtttgcaagcagcagattacgcgcagaaaaaaaggatctcaagaagatcctttgatcttttctacggggtctgacgctcagtggaacgaaaactcacgttaagggattttggtcatgagattatcaaaaaggatcttcacctagatccttttaaattaaaaatgaagttttaaatcaatctaaagtatatatgagtaaacttggtctgacagttaccaatgcttaatcagtgaggcacctatctcagcgatctgtctatttcgttcatccatagttgcctgactccccgtcgtgtagataactacgatacgggagggcttaccatctggccccagtgctgcaatgataccgcgagacccacgctcaccggctccagatttatcagcaataaaccagccagccggaagggccgagcgcagaagtggtcctgcaactttatccgcctccatccagtctattaattgttgccgggaagctagagtaagtagttcgccagttaatagtttgcgcaacgttgttgccattgctacaggcatcgtggtgtcacgctcgtcgtttggtatggcttcattcagctccggttcccaacgatcaaggcgagttacatgatcccccatgttgtgcaaaaaagcggttagctccttcggtcctccgatcgttgtcagaagtaagttggccgcagtgttatcactcatggttatggcagcactgcataattctcttactgtcatgccatccgtaagatgcttttctgtgactggtgagtactcaaccaagtcattctgagaatagtgtatgcggcgaccgagttgctcttgcccggcgtcaatacgggataataccgcgccacatagcagaactttaaaagtgctcatcattggaaaacgttcttcggggcgaaaactctcaaggatcttaccgctgttgagatccagttcgatgtaacccactcgtgcacccaactgatcttcagcatcttttactttcaccagcgtttctgggtgagcaaaaacaggaaggcaaaatgccgcaaaaaagggaataagggcgacacggaaatgttgaatactcatactcttcctttttcaatattattgaagcatttatcagggttattgtctcatgagcggatacatatttgaatgtatttagaaaaataaacaaataggggttccgcgcacatttccccgaaaagtgccacctgacgtc

SEQ ID NO: 572 - DNA, 6083 bp, Artificial Sequence
  Description of Artificial Sequence: Synthetic polynucleotide
gacggatcgggagatctcccgatcccctatggtgcactctcagtacaatctgctctgatgccgcatagttaagccagtatctgctccctgcttgtgtgttggaggtcgctgagtagtgcgcgagcaaaatttaagctacaacaaggcaaggcttgaccgacaattgcatgaagaatctgcttagggttaggcgttttgcgctgcttcgcgatgtacgggccagatatacgcgttgacattgattattgactagttattaatagtaatcaattacggggtcattagttcatagcccatatatggagttccgcgttacataacttacggtaaatggcccgcctggctgaccgcccaacgacccccgcccattgacgtcaataatgacgtatgttcccatagtaacgccaatagggactttccattgacgtcaatgggtggagtatttacggtaaactgcccacttggcagtacatcaagtgtatcatatgccaagtacgccccctattgacgtcaatgacggtaaatggcccgcctggcattatgcccagtacatgaccttatgggactttcctacttggcagtacatctacgtattagtcatcgctattaccatggtgatgcggttttggcagtacatcaatgggcgtggatagcggtttgactcacggggatttccaagtctccaccccattgacgtcaatgggagtttgttttggcaccaaaatcaacgggactttccaaaatgtcgtaacaactccgccccattgacgcaaatgggcggtaggcgtgtacggtgggaggtctatataagcagagctctctggctaactagagaacccactgcttactggcttatcgaaattaatacgactcactatagggagacccaagctggctagcgtttaaacttaagcttggtaccgagctcggatccatgtggactctcgggcgccgcgcagtagccggcctcctggcgtcacccagcccagcccaggcccagaccctcacccgggtcccgcggccggcagagttggccccactctgcggccgccgtggcctgcgcaccgacatcgatgcgacctgcacgccccgccgcgcaagttcgaaccaacgtggcctcaaccagatttggaatgtcaaaaagcagagtgtctatttgatgaatttgaggaaatctggaactttgggccacccaggctctctagatgagaccacctatgaaagactagcagaggaaacgctggactctttagcagagttttttgaagaccttgcagacaagccatacacgtttgaggactatgatgtctcctttgggagtggtgtcttaactgtcaaactgggtggagatctaggaacctatgtgatcaacaagcagacgccaaacaagcaaatctggctatcttctccatccagtggacctaagcgttatgactggactgggaaaaactgggtgtactcccacgacggcgtgtccctccatgagctgctggccgcagagctcactaaagccttaaaaaccaaactggacttgtcttccttggcctattccggaaaagatgctggatccgactacaaagaccatgacggtgattataaagatcatgacatcgactacaaggatgacgatgacaagtagctcgagtctagagggcccgtttaaacccgctgatcagcctcgactgtgccttctagttgccagccatctgttgtttgcccctcccccgtgccttccttgaccctggaaggtgccactcccactgtcctttcctaataaaatgaggaaattgcatcgcattgtctgagtaggtgtcattctattctggggggtggggtggggcaggacagcaagggggaggattgggaagacaatagcaggcatgctggggatgcggtgggctctatggcttctgaggcggaaagaaccagctggggctctagggggtatccccacgcgccctgtagcggcgcattaagcgcggcgggtgtggtggttacgcgcagcgtgaccgctacacttgccagcgccctagcgcccgctcctttcgctttcttcccttcctttctcgccacgttcgccggctttccccgtcaagctctaaatcgggggctccctttagggttccgatttagtgctttacggcacctcgaccccaaaaaacttgattagggtgatggttcacgtagtgggccatcgccctgatagacggtttttcgccctttgacgttggagtccacgttctttaatagtggactcttgttccaaactggaacaacactcaaccctatctcggtctattcttttgatttataagggattttgccgatttcggcctattggttaaaaaatgagctgatttaacaaaaatttaacgcgaattaattctgtggaatgtgtgtcagttagggtgtggaaagtccccaggctccccagcaggcagaagtatgcaaagcatgcatctcaattagtcagcaaccaggtgtggaaagtccccaggctccccagcaggcagaagtatgcaaagcatgcatctcaattagtcagcaaccatagtcccgcccctaactccgcccatcccgcccctaactccgcccagttccgcccattctccgccccatggctgactaattttttttatttatgcagaggccgaggccgcctctgcctctgagctattccagaagtagtgaggaggcttttttggaggcctaggcttttgcaaaaagctcccgggagcttgtatatccattttcggatctgatcaagagacaggatgaggatcgtttcgcatgattgaacaagatggattgcacgcaggttctccggccgcttgggtggagaggctattcggctatgactgggcacaacagacaatcggctgctctgatgccgccgtgttccggctgtcagcgcaggggcgcccggttctttttgtcaagaccgacctgtccggtgccctgaatgaactgcaggacgaggcagcgcggctatcgtggctggccacgacgggcgttccttgcgcagctgtgctcgacgttgtcactgaagcgggaagggactggctgctattgggcgaagtgccggggcaggatctcctgtcatctcaccttgctcctgccgagaaagtatccatcatggctgatgcaatgcggcggctgcatacgcttgatccggctacctgcccattcgaccaccaagcgaaacatcgcatcgagcgagcacgtactcggatggaagccggtcttgtcgatcaggatgatctggacgaagagcatcaggggctcgcgccagccgaactgttcgccaggctcaaggcgcgcatgcccgacggcgaggatctcgtcgtgacccatggcgatgcctgcttgccgaatatcatggtggaaaatggccgcttttctggattcatcgactgtggccggctgggtgtggcggaccgctatcaggacatagcgttggctacccgtgatattgctgaagagcttggcggcgaatgggctgaccgcttcctcgtgctttacggtatcgccgctcccgattcgcagcgcatcgccttctatcgccttcttgacgagttcttctgagcgggactctggggttcgaaatgaccgaccaagcgacgcccaacctgccatcacgagatttcgattccaccgccgccttctatgaaaggttgggcttcggaatcgttttccgggacgccggctggatgatcctccagcgcggggatctcatgctggagttcttcgcccaccccaacttgtttattgcagcttataatggttacaaataaagcaatagcatcacaaatttcacaaataaagcatttttttcactgcattctagttgtggtttgtccaaactcatcaatgtatcttatcatgtctgtataccgtcgacctctagctagagcttggcgtaatcatggtcatagctgtttcctgtgtgaaattgttatccgctcacaattccacacaacatacgagccggaagcataaagtgtaaagcctggggtgcctaatgagtgagctaactcacattaattgcgttgcgctcactgcccgctttccagtcgggaaacctgtcgtgccagctgcattaatgaatcggccaacgcgcggggagaggcggtttgcgtattgggcgctcttccgcttcctcgctcactgactcgctgcgctcggtcgttcggctgcggcgagcggtatcagctcactcaaaggcggtaatacggttatccacagaatcaggggataacgcaggaaagaacatgtgagcaaaaggccagcaaaaggccaggaaccgtaaaaaggccgcgttgctggcgtttttccataggctccgcccccctgacgagcatcacaaaaatcgacgctcaagtcagaggtggcgaaacccgacaggactataaagataccaggcgtttccccctggaagctccctcgtgcgctctcctgttccgaccctgccgcttaccggatacctgtccgcctttctcccttcgggaagcgtggcgctttctcatagctcacgctgtaggtatctcagttcggtgtaggtcgttcgctccaagctgggctgtgtgcacgaaccccccgttcagcccgaccgctgcgccttatccggtaactatcgtcttgagtccaacccggtaagacacgacttatcgccactggcagcagccactggtaacaggattagcagagcgaggtatgtaggcggtgctacagagttcttgaagtggtggcctaactacggctacactagaagaacagtatttggtatctgcgctctgctgaagccagttaccttcggaaaaagagttggtagctcttgatccggcaaacaaaccaccgctggtagcggtttttttgtttgcaagcagcagattacgcgcagaaaaaaaggatctcaagaagatcctttgatcttttctacggggtctgacgctcagtggaacgaaaactcacgttaagggattttggtcatgagattatcaaaaaggatcttcacctagatccttttaaattaaaaatgaagttttaaatcaatctaaagtatatatgagtaaacttggtctgacagttaccaatgcttaatcagtgaggcacctatctcagcgatctgtctatttcgttcatccatagttgcctgactccccgtcgtgtagataactacgatacgggagggcttaccatctggccccagtgctgcaatgataccgcgagacccacgctcaccggctccagatttatcagcaataaaccagccagccggaagggccgagcgcagaagtggtcctgcaactttatccgcctccatccagtctattaattgttgccgggaagctagagtaagtagttcgccagttaatagtttgcgcaacgttgttgccattgctacaggcatcgtggtgtcacgctcgtcgtttggtatggcttcattcagctccggttcccaacgatcaaggcgagttacatgatcccccatgttgtgcaaaaaagcggttagctccttcggtcctccgatcgttgtcagaagtaagttggccgcagtgttatcactcatggttatggcagcactgcataattctcttactgtcatgccatccgtaagatgcttttctgtgactggtgagtactcaaccaagtcattctgagaatagtgtatgcggcgaccgagttgctcttgcccggcgtcaatacgggataataccgcgccacatagcagaactttaaaagtgctcatcattggaaaacgttcttcggggcgaaaactctcaaggatcttaccgctgttgagatccagttcgatgtaacccactcgtgcacccaactgatcttcagcatcttttactttcaccagcgtttctgggtgagcaaaaacaggaaggcaaaatgccgcaaaaaagggaataagggcgacacggaaatgttgaatactcatactcttcctttttcaatattattgaagcatttatcagggttattgtctcatgagcggatacatatttgaatgtatttagaaaaataaacaaataggggttccgcgcacatttccccgaaaagtgccacctgacgtc

SEQ ID NO: 573 - DNA, 6119 bp, Artificial Sequence
  Description of Artificial Sequence: Synthetic polynucleotide
gacggatcgggagatctcccgatcccctatggtgcactctcagtacaatctgctctgatgccgcatagttaagccagtatctgctccctgcttgtgtgttggaggtcgctgagtagtgcgcgagcaaaatttaagctacaacaaggcaaggcttgaccgacaattgcatgaagaatctgcttagggttaggcgttttgcgctgcttcgcgatgtacgggccagatatacgcgttgacattgattattgactagttattaatagtaatcaattacggggtcattagttcatagcccatatatggagttccgcgttacataacttacggtaaatggcccgcctggctgaccgcccaacgacccccgcccattgacgtcaataatgacgtatgttcccatagtaacgccaatagggactttccattgacgtcaatgggtggagtatttacggtaaactgcccacttggcagtacatcaagtgtatcatatgccaagtacgccccctattgacgtcaatgacggtaaatggcccgcctggcattatgcccagtacatgaccttatgggactttcctacttggcagtacatctacgtattagtcatcgctattaccatggtgatgcggttttggcagtacatcaatgggcgtggatagcggtttgactcacggggatttccaagtctccaccccattgacgtcaatgggagtttgttttggcaccaaaatcaacgggactttccaaaatgtcgtaacaactccgccccattgacgcaaatgggcggtaggcgtgtacggtgggaggtctatataagcagagctctctggctaactagagaacccactgcttactggcttatcgaaattaatacgactcactatagggagacccaagctggctagcgtttaaacttaagcttggtaccgagctcggatccatgtggactctcgggcgccgcgcagtagccggcctcctggcgtcacccagcccagcccaggcccagaccctcacccgggtcccgcggccggcagagttggccccactctgcggccgccgtggcctgcgcaccgacatcgatgcgacctgcacgccccgccgcgcaagttcgaaccaacgtggcctcaaccagatttggaatgtcaaaaagcagagtgtctatttgatgaatttgaggaaatctggaactttgggccacccaggctctctagatgagaccacctatgaaagactagcagaggaaacgctggactctttagcagagttttttgaagaccttgcagacaagccatacacgtttgaggactatgatgtctcctttgggagtggtgtcttaactgtcaaactgggtggagatctaggaacctatgtgatcaacaagcagacgccaaacaagcaaatctggctatcttctccatccagtggacctaagcgttatgactggactgggaaaaactgggtgtactcccacgacggcgtgtccctccatgagctgctggccgcagagctcactaaagccttaaaaaccaaactggacttgtcttccttggcctattccggaaaagatgctggatccgaacaaaaactcatctcagaagaggatctgggatccgactacaaagaccatgacggtgattataaagatcatgacatcgactacaaggatgacgatgacaagtagctcgagtctagagggcccgtttaaacccgctgatcagcctcgactgtgccttctagttgccagccatctgttgtttgcccctcccccgtgccttccttgaccctggaaggtgccactcccactgtcctttcctaataaaatgaggaaattgcatcgcattgtctgagtaggtgtcattctattctggggggtggggtggggcaggacagcaagggggaggattgggaagacaatagcaggcatgctggggatgcggtgggctctatggcttctgaggcggaaagaaccagctggggctctagggggtatccccacgcgccctgtagcggcgcattaagcgcggcgggtgtggtggttacgcgcagcgtgaccgctacacttgccagcgccctagcgcccgctcctttcgctttcttcccttcctttctcgccacgttcgccggctttccccgtcaagctctaaatcgggggctccctttagggttccgatttagtgctttacggcacctcgaccccaaaaaacttgattagggtgatggttcacgtagtgggccatcgccctgatagacggtttttcgccctttgacgttggagtccacgttctttaatagtggactcttgttccaaactggaacaacactcaaccctatctcggtctattcttttgatttataagggattttgccgatttcggcctattggttaaaaaatgagctgatttaacaaaaatttaacgcgaattaattctgtggaatgtgtgtcagttagggtgtggaaagtccccaggctccccagcaggcagaagtatgcaaagcatgcatctcaattagtcagcaaccaggtgtggaaagtccccaggctccccagcaggcagaagtatgcaaagcatgcatctcaattagtcagcaaccatagtcccgcccctaactccgcccatcccgcccctaactccgcccagttccgcccattctccgccccatggctgactaattttttttatttatgcagaggccgaggccgcctctgcctctgagctattccagaagtagtgaggaggcttttttggaggcctaggcttttgcaaaaagctcccgggagcttgtatatccattttcggatctgatcaagagacaggatgaggatcgtttcgcatgattgaacaagatggattgcacgcaggttctccggccgcttgggtggagaggctattcggctatgactgggcacaacagacaatcggctgctctgatgccgccgtgttccggctgtcagcgcaggggcgcccggttctttttgtcaagaccgacctgtccggtgccctgaatgaactgcaggacgaggcagcgcggctatcgtggctggccacgacgggcgttccttgcgcagctgtgctcgacgttgtcactgaagcgggaagggactggctgctattgggcgaagtgccggggcaggatctcctgtcatctcaccttgctcctgccgagaaagtatccatcatggctgatgcaatgcggcggctgcatacgcttgatccggctacctgcccattcgaccaccaagcgaaacatcgcatcgagcgagcacgtactcggatggaagccggtcttgtcgatcaggatgatctggacgaagagcatcaggggctcgcgccagccgaactgttcgccaggctcaaggcgcgcatgcccgacggcgaggatctcgtcgtgacccatggcgatgcctgcttgccgaatatcatggtggaaaatggccgcttttctggattcatcgactgtggccggctgggtgtggcggaccgctatcaggacatagcgttggctacccgtgatattgctgaagagcttggcggcgaatgggctgaccgcttcctcgtgctttacggtatcgccgctcccgattcgcagcgcatcgccttctatcgccttcttgacgagttcttctgagcgggactctggggttcgaaatgaccgaccaagcgacgcccaacctgccatcacgagatttcgattccaccgccgccttctatgaaaggttgggcttcggaatcgttttccgggacgccggctggatgatcctccagcgcggggatctcatgctggagttcttcgcccaccccaacttgtttattgcagcttataatggttacaaataaagcaatagcatcacaaatttcacaaataaagcatttttttcactgcattctagttgtggtttgtccaaactcatcaatgtatcttatcatgtctgtataccgtcgacctctagctagagcttggcgtaatcatggtcatagctgtttcctgtgtgaaattgttatccgctcacaattccacacaacatacgagccggaagcataaagtgtaaagcctggggtgcctaatgagtgagctaactcacattaattgcgttgcgctcactgcccgctttccagtcgggaaacctgtcgtgccagctgcattaatgaatcggccaacgcgcggggagaggcggtttgcgtattgggcgctcttccgcttcctcgctcactgactcgctgcgctcggtcgttcggctgcggcgagcggtatcagctcactcaaaggcggtaatacggttatccacagaatcaggggataacgcaggaaagaacatgtgagcaaaaggccagcaaaaggccaggaaccgtaaaaaggccgcgttgctggcgtttttccataggctccgcccccctgacgagcatcacaaaaatcgacgctcaagtcagaggtggcgaaacccgacaggactataaagataccaggcgtttccccctggaagctccctcgtgcgctctcctgttccgaccctgccgcttaccggatacctgtccgcctttctcccttcgggaagcgtggcgctttctcatagctcacgctgtaggtatctcagttcggtgtaggtcgttcgctccaagctgggctgtgtgcacgaaccccccgttcagcccgaccgctgcgccttatccggtaactatcgtcttgagtccaacccggtaagacacgacttatcgccactggcagcagccactggtaacaggattagcagagcgaggtatgtaggcggtgctacagagttcttgaagtggtggcctaactacggctacactagaagaacagtatttggtatctgcgctctgctgaagccagttaccttcggaaaaagagttggtagctcttgatccggcaaacaaaccaccgctggtagcggtttttttgtttgcaagcagcagattacgcgcagaaaaaaaggatctcaagaagatcctttgatcttttctacggggtctgacgctcagtggaacgaaaactcacgttaagggattttggtcatgagattatcaaaaaggatcttcacctagatccttttaaattaaaaatgaagttttaaatcaatctaaagtatatatgagtaaacttggtctgacagttaccaatgcttaatcagtgaggcacctatctcagcgatctgtctatttcgttcatccatagttgcctgactccccgtcgtgtagataactacgatacgggagggcttaccatctggccccagtgctgcaatgataccgcgagacccacgctcaccggctccagatttatcagcaataaaccagccagccggaagggccgagcgcagaagtggtcctgcaactttatccgcctccatccagtctattaattgttgccgggaagctagagtaagtagttcgccagttaatagtttgcgcaacgttgttgccattgctacaggcatcgtggtgtcacgctcgtcgtttggtatggcttcattcagctccggttcccaacgatcaaggcgagttacatgatcccccatgttgtgcaaaaaagcggttagctccttcggtcctccgatcgttgtcagaagtaagttggccgcagtgttatcactcatggttatggcagcactgcataattctcttactgtcatgccatccgtaagatgcttttctgtgactggtgagtactcaaccaagtcattctgagaatagtgtatgcggcgaccgagttgctcttgcccggcgtcaatacgggataataccgcgccacatagcagaactttaaaagtgctcatcattggaaaacgttcttcggggcgaaaactctcaaggatcttaccgctgttgagatccagttcgatgtaacccactcgtgcacccaactgatcttcagcatcttttactttcaccagcgtttctgggtgagcaaaaacaggaaggcaaaatgccgcaaaaaagggaataagggcgacacggaaatgttgaatactcatactcttcctttttcaatattattgaagcatttatcagggttattgtctcatgagcggatacatatttgaatgtatttagaaaaataaacaaataggggttccgcgcacatttccccgaaaagtgccacctgacgtc

SEQ ID NO: 574 - DNA, 6041 bp, Artificial Sequence
  Description of Artificial Sequence: Synthetic polynucleotide
gacggatcgggagatctcccgatcccctatggtgcactctcagtacaatctgctctgatgccgcatagttaagccagtatctgctccctgcttgtgtgttggaggtcgctgagtagtgcgcgagcaaaatttaagctacaacaaggcaaggcttgaccgacaattgcatgaagaatctgcttagggttaggcgttttgcgctgcttcgcgatgtacgggccagatatacgcgttgacattgattattgactagttattaatagtaatcaattacggggtcattagttcatagcccatatatggagttccgcgttacataacttacggtaaatggcccgcctggctgaccgcccaacgacccccgcccattgacgtcaataatgacgtatgttcccatagtaacgccaatagggactttccattgacgtcaatgggtggagtatttacggtaaactgcccacttggcagtacatcaagtgtatcatatgccaagtacgccccctattgacgtcaatgacggtaaatggcccgcctggcattatgcccagtacatgaccttatgggactttcctacttggcagtacatctacgtattagtcatcgctattaccatggtgatgcggttttggcagtacatcaatgggcgtggatagcggtttgactcacggggatttccaagtctccaccccattgacgtcaatgggagtttgttttggcaccaaaatcaacgggactttccaaaatgtcgtaacaactccgccccattgacgcaaatgggcggtaggcgtgtacggtgggaggtctatataagcagagctctctggctaactagagaacccactgcttactggcttatcgaaattaatacgactcactatagggagacccaagctggctagcgtttaaacttaagcttggtaccgagctcggatccatgtggactctcgggcgccgcgcagtagccggcctcctggcgtcacccagcccagcccaggcccagaccctcacccgggtcccgcggccggcagagttggccccactctgcggccgccgtggcctgcgcaccgacatcgatgcgacctgcacgccccgccgcgcaagttcgaaccaacgtggcctcaaccagatttggaatgtcaaaaagcagagtgtctatttgatgaatttgaggaaatctggaactttgggccacccaggctctctagatgagaccacctatgaaagactagcagaggaaacgctggactctttagcagagttttttgaagaccttgcagacaagccatacacgtttgaggactatgatgtctcctttgggagtggtgtcttaactgtcaaactgggtggagatctaggaacctatgtgatcaacaagcagacgccaaacaagcaaatctggctatcttctccatccagtggacctaagcgttatgactggactgggaaaaactgggtgtactcccacgacggcgtgtccctccatgagctgctggccgcagagctcactaaagccttaaaaaccaaactggacttgtcttccttggcctattccggaaaagatgctgaacaaaaactcatctcagaagaggatctgtagctcgagtctagagggcccgtttaaacccgctgatcagcctcgactgtgccttctagttgccagccatctgttgtttgcccctcccccgtgccttccttgaccctggaaggtgccactcccactgtcctttcctaataaaatgaggaaattgcatcgcattgtctgagtaggtgtcattctattctggggggtggggtggggcaggacagcaagggggaggattgggaagacaatagcaggcatgctggggatgcggtgggctctatggcttctgaggcggaaagaaccagctggggctctagggggtatccccacgcgccctgtagcggcgcattaagcgcggcgggtgtggtggttacgcgcagcgtgaccgctacacttgccagcgccctagcgcccgctcctttcgctttcttcccttcctttctcgccacgttcgccggctttccccgtcaagctctaaatcgggggctccctttagggttccgatttagtgctttacggcacctcgaccccaaaaaacttgattagggtgatggttcacgtagtgggccatcgccctgatagacggtttttcgccctttgacgttggagtccacgttctttaatagtggactcttgttccaaactggaacaacactcaaccctatctcggtctattcttttgatttataagggattttgccgatttcggcctattggttaaaaaatgagctgatttaacaaaaatttaacgcgaattaattctgtggaatgtgtgtcagttagggtgtggaaagtccccaggctccccagcaggcagaagtatgcaaagcatgcatctcaattagtcagcaaccaggtgtggaaagtccccaggctccccagcaggcagaagtatgcaaagcatgcatctcaattagtcagcaaccatagtcccgcccctaactccgcccatcccgcccctaactccgcccagttccgcccattctccgccccatggctgactaattttttttatttatgcagaggccgaggccgcctctgcctctgagctattccagaagtagtgaggaggcttttttggaggcctaggcttttgcaaaaagctcccgggagcttgtatatccattttcggatctgatcaagagacaggatgaggatcgtttcgcatgattgaacaagatggattgcacgcaggttctccggccgcttgggtggagaggctattcggctatgactgggcacaacagacaatcggctgctctgatgccgccgtgttccggctgtcagcgcaggggcgcccggttctttttgtcaagaccgacctgtccggtgccctgaatgaactgcaggacgaggcagcgcggctatcgtggctggccacgacgggcgttccttgcgcagctgtgctcgacgttgtcactgaagcgggaagggactggctgctattgggcgaagtgccggggcaggatctcctgtcatctcaccttgctcctgccgagaaagtatccatcatggctgatgcaatgcggcggctgcatacgcttgatccggctacctgcccattcgaccaccaagcgaaacatcgcatcgagcgagcacgtactcggatggaagccggtcttgtcgatcaggatgatctggacgaagagcatcaggggctcgcgccagccgaactgttcgccaggctcaaggcgcgcatgcccgacggcgaggatctcgtcgtgacccatggcgatgcctgcttgccgaatatcatggtggaaaatggccgcttttctggattcatcgactgtggccggctgggtgtggcggaccgctatcaggacatagcgttggctacccgtgatattgctgaagagcttggcggcgaatgggctgaccgcttcctcgtgctttacggtatcgccgctcccgattcgcagcgcatcgccttctatcgccttcttgacgagttcttctgagcgggactctggggttcgaaatgaccgaccaagcgacgcccaacctgccatcacgagatttcgattccaccgccgccttctatgaaaggttgggcttcggaatcgttttccgggacgccggctggatgatcctccagcgcggggatctcatgctggagttcttcgcccaccccaacttgtttattgcagcttataatggttacaaataaagcaatagcatcacaaatttcacaaataaagcatttttttcactgcattctagttgtggtttgtccaaactcatcaatgtatcttatcatgtctgtataccgtcgacctctagctagagcttggcgtaatcatggtcatagctgtttcctgtgtgaaattgttatccgctcacaattccacacaacatacgagccggaagcataaagtgtaaagcctggggtgcctaatgagtgagctaactcacattaattgcgttgcgctcactgcccgctttccagtcgggaaacctgtcgtgccagctgcattaatgaatcggccaacgcgcggggagaggcggtttgcgtattgggcgctcttccgcttcctcgctcactgactcgctgcgctcggtcgttcggctgcggcgagcggtatcagctcactcaaaggcggtaatacggttatccacagaatcaggggataacgcaggaaagaacatgtgagcaaaaggccagcaaaaggccaggaaccgtaaaaaggccgcgttgctggcgtttttccataggctccgcccccctgacgagcatcacaaaaatcgacgctcaagtcagaggtggcgaaacccgacaggactataaagataccaggcgtttccccctggaagctccctcgtgcgctctcctgttccgaccctgccgcttaccggatacctgtccgcctttctcccttcgggaagcgtggcgctttctcatagctcacgctgtaggtatctcagttcggtgtaggtcgttcgctccaagctgggctgtgtgcacgaaccccccgttcagcccgaccgctgcgccttatccggtaactatcgtcttgagtccaacccggtaagacacgacttatcgccactggcagcagccactggtaacaggattagcagagcgaggtatgtaggcggtgctacagagttcttgaagtggtggcctaactacggctacactagaagaacagtatttggtatctgcgctctgctgaagccagttaccttcggaaaaagagttggtagctcttgatccggcaaacaaaccaccgctggtagcggtttttttgtttgcaagcagcagattacgcgcagaaaaaaaggatctcaagaagatcctttgatcttttctacggggtctgacgctcagtggaacgaaaactcacgttaagggattttggtcatgagattatcaaaaaggatcttcacctagatccttttaaattaaaaatgaagttttaaatcaatctaaagtatatatgagtaaacttggtctgacagttaccaatgcttaatcagtgaggcacctatctcagcgatctgtctatttcgttcatccatagttgcctgactccccgtcgtgtagataactacgatacgggagggcttaccatctggccccagtgctgcaatgataccgcgagacccacgctcaccggctccagatttatcagcaataaaccagccagccggaagggccgagcgcagaagtggtcctgcaactttatccgcctccatccagtctattaattgttgccgggaagctagagtaagtagttcgccagttaatagtttgcgcaacgttgttgccattgctacaggcatcgtggtgtcacgctcgtcgtttggtatggcttcattcagctccggttcccaacgatcaaggcgagttacatgatcccccatgttgtgcaaaaaagcggttagctccttcggtcctccgatcgttgtcagaagtaagttggccgcagtgttatcactcatggttatggcagcactgcataattctcttactgtcatgccatccgtaagatgcttttctgtgactggtgagtactcaaccaagtcattctgagaatagtgtatgcggcgaccgagttgctcttgcccggcgtcaatacgggataataccgcgccacatagcagaactttaaaagtgctcatcattggaaaacgttcttcggggcgaaaactctcaaggatcttaccgctgttgagatccagttcgatgtaacccactcgtgcacccaactgatcttcagcatcttttactttcaccagcgtttctgggtgagcaaaaacaggaaggcaaaatgccgcaaaaaagggaataagggcgacacggaaatgttgaatactcatactcttcctttttcaatattattgaagcatttatcagggttattgtctcatgagcggatacatatttgaatgtatttagaaaaataaacaaataggggttccgcgcacatttccccgaaaagtgccacctgacgtc

SEQ ID NO: 575 - DNA, 6053 bp, Artificial Sequence
  Description of Artificial Sequence: Synthetic polynucleotide
gacggatcgggagatctcccgatcccctatggtgcactctcagtacaatctgctctgatgccgcatagttaagccagtatctgctccctgcttgtgtgttggaggtcgctgagtagtgcgcgagcaaaatttaagctacaacaaggcaaggcttgaccgacaattgcatgaagaatctgcttagggttaggcgttttgcgctgcttcgcgatgtacgggccagatatacgcgttgacattgattattgactagttattaatagtaatcaattacggggtcattagttcatagcccatatatggagttccgcgttacataacttacggtaaatggcccgcctggctgaccgcccaacgacccccgcccattgacgtcaataatgacgtatgttcccatagtaacgccaatagggactttccattgacgtcaatgggtggagtatttacggtaaactgcccacttggcagtacatcaagtgtatcatatgccaagtacgccccctattgacgtcaatgacggtaaatggcccgcctggcattatgcccagtacatgaccttatgggactttcctacttggcagtacatctacgtattagtcatcgctattaccatggtgatgcggttttggcagtacatcaatgggcgtggatagcggtttgactcacggggatttccaagtctccaccccattgacgtcaatgggagtttgttttggcaccaaaatcaacgggactttccaaaatgtcgtaacaactccgccccattgacgcaaatgggcggtaggcgtgtacggtgggaggtctatataagcagagctctctggctaactagagaacccactgcttactggcttatcgaaattaatacgactcactatagggagacccaagctggctagcgtttaaacttaagcttggtaccgagctcggatccatgtggactctcgggcgccgcgcagtagccggcctcctggcgtcacccagcccagcccaggcccagaccctcacccgggtcccgcggccggcagagttggccccactctgcggccgccgtggcctgcgcaccgacatcgatgcgacctgcacgccccgccgcgcaagttcgaaccaacgtggcctcaaccagatttggaatgtcaaaaagcagagtgtctatttgatgaatttgaggaaatctggaactttgggccacccaggctctctagatgagaccacctatgaaagactagcagaggaaacgctggactctttagcagagttttttgaagaccttgcagacaagccatacacgtttgaggactatgatgtctcctttgggagtggtgtcttaactgtcaaactgggtggagatctaggaacctatgtgatcaacaagcagacgccaaacaagcaaatctggctatcttctccatccagtggacctaagcgttatgactggactgggaaaaactgggtgtactcccacgacggcgtgtccctccatgagctgctggccgcagagctcactaaagccttaaaaaccaaactggacttgtcttccttggcctattccggaaaagatgcttatccttatgacgtgcctgactatgccagcctgggaggaccttgactcgagtctagagggcccgtttaaacccgctgatcagcctcgactgtgccttctagttgccagccatctgttgtttgcccctcccccgtgccttccttgaccctggaaggtgccactcccactgtcctttcctaataaaatgaggaaattgcatcgcattgtctgagtaggtgtcattctattctggggggtggggtggggcaggacagcaagggggaggattgggaagacaatagcaggcatgctggggatgcggtgggctctatggcttctgaggcggaaagaaccagctggggctctagggggtatccccacgcgccctgtagcggcgcattaagcgcggcgggtgtggtggttacgcgcagcgtgaccgctacacttgccagcgccctagcgcccgctcctttcgctttcttcccttcctttctcgccacgttcgccggctttccccgtcaagctctaaatcgggggctccctttagggttccgatttagtgctttacggcacctcgaccccaaaaaacttgattagggtgatggttcacgtagtgggccatcgccctgatagacggtttttcgccctttgacgttggagtccacgttctttaatagtggactcttgttccaaactggaacaacactcaaccctatctcggtctattcttttgatttataagggattttgccgatttcggcctattggttaaaaaatgagctgatttaacaaaaatttaacgcgaattaattctgtggaatgtgtgtcagttagggtgtggaaagtccccaggctccccagcaggcagaagtatgcaaagcatgcatctcaattagtcagcaaccaggtgtggaaagtccccaggctccccagcaggcagaagtatgcaaagcatgcatctcaattagtcagcaaccatagtcccgcccctaactccgcccatcccgcccctaactccgcccagttccgcccattctccgccccatggctgactaattttttttatttatgcagaggccgaggccgcctctgcctctgagctattccagaagtagtgaggaggcttttttggaggcctaggcttttgcaaaaagctcccgggagcttgtatatccattttcggatctgatcaagagacaggatgaggatcgtttcgcatgattgaacaagatggattgcacgcaggttctccggccgcttgggtggagaggctattcggctatgactgggcacaacagacaatcggctgctctgatgccgccgtgttccggctgtcagcgcaggggcgcccggttctttttgtcaagaccgacctgtccggtgccctgaatgaactgcaggacgaggcagcgcggctatcgtggctggccacgacgggcgttccttgcgcagctgtgctcgacgttgtcactgaagcgggaagggactggctgctattgggcgaagtgccggggcaggatctcctgtcatctcaccttgctcctgccgagaaagtatccatcatggctgatgcaatgcggcggctgcatacgcttgatccggctacctgcccattcgaccaccaagcgaaacatcgcatcgagcgagcacgtactcggatggaagccggtcttgtcgatcaggatgatctggacgaagagcatcaggggctcgcgccagccgaactgttcgccaggctcaaggcgcgcatgcccgacggcgaggatctcgtcgtgacccatggcgatgcctgcttgccgaatatcatggtggaaaatggccgcttttctggattcatcgactgtggccggctgggtgtggcggaccgctatcaggacatagcgttggctacccgtgatattgctgaagagcttggcggcgaatgggctgaccgcttcctcgtgctttacggtatcgccgctcccgattcgcagcgcatcgccttctatcgccttcttgacgagttcttctgagcgggactctggggttcgaaatgaccgaccaagcgacgcccaacctgccatcacgagatttcgattccaccgccgccttctatgaaaggttgggcttcggaatcgttttccgggacgccggctggatgatcctccagcgcggggatctcatgctggagttcttcgcccaccccaacttgtttattgcagcttataatggttacaaataaagcaatagcatcacaaatttcacaaataaagcatttttttcactgcattctagttgtggtttgtccaaactcatcaatgtatcttatcatgtctgtataccgtcgacctctagctagagcttggcgtaatcatggtcatagctgtttcctgtgtgaaattgttatccgctcacaattccacacaacatacgagccggaagcataaagtgtaaagcctggggtgcctaatgagtgagctaactcacattaattgcgttgcgctcactgcccgctttccagtcgggaaacctgtcgtgccagctgcattaatgaatcggccaacgcgcggggagaggcggtttgcgtattgggcgctcttccgcttcctcgctcactgactcgctgcgctcggtcgttcggctgcggcgagcggtatcagctcactcaaaggcggtaatacggttatccacagaatcaggggataacgcaggaaagaacatgtgagcaaaaggccagcaaaaggccaggaaccgtaaaaaggccgcgttgctggcgtttttccataggctccgcccccctgacgagcatcacaaaaatcgacgctcaagtcagaggtggcgaaacccgacaggactataaagataccaggcgtttccccctggaagctccctcgtgcgctctcctgttccgaccctgccgcttaccggatacctgtccgcctttctcccttcgggaagcgtggcgctttctcatagctcacgctgtaggtatctcagttcggtgtaggtcgttcgctccaagctgggctgtgtgcacgaaccccccgttcagcccgaccgctgcgccttatccggtaactatcgtcttgagtccaacccggtaagacacgacttatcgccactggcagcagccactggtaacaggattagcagagcgaggtatgtaggcggtgctacagagttcttgaagtggtggcctaactacggctacactagaagaacagtatttggtatctgcgctctgctgaagccagttaccttcggaaaaagagttggtagctcttgatccggcaaacaaaccaccgctggtagcggtttttttgtttgcaagcagcagattacgcgcagaaaaaaaggatctcaagaagatcctttgatcttttctacggggtctgacgctcagtggaacgaaaactcacgttaagggattttggtcatgagattatcaaaaaggatcttcacctagatccttttaaattaaaaatgaagttttaaatcaatctaaagtatatatgagtaaacttggtctgacagttaccaatgcttaatcagtgaggcacctatctcagcgatctgtctatttcgttcatccatagttgcctgactccccgtcgtgtagataactacgatacgggagggcttaccatctggccccagtgctgcaatgataccgcgagacccacgctcaccggctccagatttatcagcaataaaccagccagccggaagggccgagcgcagaagtggtcctgcaactttatccgcctccatccagtctattaattgttgccgggaagctagagtaagtagttcgccagttaatagtttgcgcaacgttgttgccattgctacaggcatcgtggtgtcacgctcgtcgtttggtatggcttcattcagctccggttcccaacgatcaaggcgagttacatgatcccccatgttgtgcaaaaaagcggttagctccttcggtcctccgatcgttgtcagaagtaagttggccgcagtgttatcactcatggttatggcagcactgcataattctcttactgtcatgccatccgtaagatgcttttctgtgactggtgagtactcaaccaagtcattctgagaatagtgtatgcggcgaccgagttgctcttgcccggcgtcaatacgggataataccgcgccacatagcagaactttaaaagtgctcatcattggaaaacgttcttcggggcgaaaactctcaaggatcttaccgctgttgagatccagttcgatgtaacccactcgtgcacccaactgatcttcagcatcttttactttcaccagcgtttctgggtgagcaaaaacaggaaggcaaaatgccgcaaaaaagggaataagggcgacacggaaatgttgaatactcatactcttcctttttcaatattattgaagcatttatcagggttattgtctcatgagcggatacatatttgaatgtatttagaaaaataaacaaataggggttccgcgcacatttccccgaaaagtgccacctgacgtc

SEQ ID NO: 576 - DNA, 6038 bp, Artificial Sequence
  Description of Artificial Sequence: Synthetic polynucleotide
gacggatcgggagatctcccgatcccctatggtgcactctcagtacaatctgctctgatgccgcatagttaagccagtatctgctccctgcttgtgtgttggaggtcgctgagtagtgcgcgagcaaaatttaagctacaacaaggcaaggcttgaccgacaattgcatgaagaatctgcttagggttaggcgttttgcgctgcttcgcgatgtacgggccagatatacgcgttgacattgattattgactagttattaatagtaatcaattacggggtcattagttcatagcccatatatggagttccgcgttacataacttacggtaaatggcccgcctggctgaccgcccaacgacccccgcccattgacgtcaataatgacgtatgttcccatagtaacgccaatagggactttccattgacgtcaatgggtggagtatttacggtaaactgcccacttggcagtacatcaagtgtatcatatgccaagtacgccccctattgacgtcaatgacggtaaatggcccgcctggcattatgcccagtacatgaccttatgggactttcctacttggcagtacatctacgtattagtcatcgctattaccatggtgatgcggttttggcagtacatcaatgggcgtggatagcggtttgactcacggggatttccaagtctccaccccattgacgtcaatgggagtttgttttggcaccaaaatcaacgggactttccaaaatgtcgtaacaactccgccccattgacgcaaatgggcggtaggcgtgtacggtgggaggtctatataagcagagctctctggctaactagagaacccactgcttactggcttatcgaaattaatacgactcactatagggagacccaagctggctagcgtttaaacttaagcttggtaccgagctcggatccatgtggactctcgggcgccgcgcagtagccggcctcctggcgtcacccagcccagcccaggcccagaccctcacccgggtcccgcggccggcagagttggccccactctgcggccgccgtggcctgcgcaccgacatcgatgcgacctgcacgccccgccgcgcaagttcgaaccaacgtggcctcaaccagatttggaatgtcaaaaagcagagtgtctatttgatgaatttgaggaaatctggaactttgggccacccaggctctctagatgagaccacctatgaaagactagcagaggaaacgctggactctttagcagagttttttgaagaccttgcagacaagccatacacgtttgaggactatgatgtctcctttgggagtggtgtcttaactgtcaaactgggtggagatctaggaacctatgtgatcaacaagcagacgccaaacaagcaaatctggctatcttctccatccagtggacctaagcgttatgactggactgggaaaaactgggtgtactcccacgacggcgtgtccctccatgagctgctggccgcagagctcactaaagccttaaaaaccaaactggacttgtcttccttggcctattccggaaaagatgcttatccttatgacgtgcctgactatgcctgactcgagtctagagggcccgtttaaacccgctgatcagcctcgactgtgccttctagttgccagccatctgttgtttgcccctcccccgtgccttccttgaccctggaaggtgccactcccactgtcctttcctaataaaatgaggaaattgcatcgcattgtctgagtaggtgtcattctattctggggggtggggtggggcaggacagcaagggggaggattgggaagacaatagcaggcatgctggggatgcggtgggctctatggcttctgaggcggaaagaaccagctggggctctagggggtatccccacgcgccctgtagcggcgcattaagcgcggcgggtgtggtggttacgcgcagcgtgaccgctacacttgccagcgccctagcgcccgctcctttcgctttcttcccttcctttctcgccacgttcgccggctttccccgtcaagctctaaatcgggggctccctttagggttccgatttagtgctttacggcacctcgaccccaaaaaacttgattagggtgatggttcacgtagtgggccatcgccctgatagacggtttttcgccctttgacgttggagtccacgttctttaatagtggactcttgttccaaactggaacaacactcaaccctatctcggtctattcttttgatttataagggattttgccgatttcggcctattggttaaaaaatgagctgatttaacaaaaatttaacgcgaattaattctgtggaatgtgtgtcagttagggtgtggaaagtccccaggctccccagcaggcagaagtatgcaaagcatgcatctcaattagtcagcaaccaggtgtggaaagtccccaggctccccagcaggcagaagtatgcaaagcatgcatctcaattagtcagcaaccatagtcccgcccctaactccgcccatcccgcccctaactccgcccagttccgcccattctccgccccatggctgactaattttttttatttatgcagaggccgaggccgcctctgcctctgagctattccagaagtagtgaggaggcttttttggaggcctaggcttttgcaaaaagctcccgggagcttgtatatccattttcggatctgatcaagagacaggatgaggatcgtttcgcatgattgaacaagatggattgcacgcaggttctccggccgcttgggtggagaggctattcggctatgactgggcacaacagacaatcggctgctctgatgccgccgtgttccggctgtcagcgcaggggcgcccggttctttttgtcaagaccgacctgtccggtgccctgaatgaactgcaggacgaggcagcgcggctatcgtggctggccacgacgggcgttccttgcgcagctgtgctcgacgttgtcactgaagcgggaagggactggctgctattgggcgaagtgccggggcaggatctcctgtcatctcaccttgctcctgccgagaaagtatccatcatggctgatgcaatgcggcggctgcatacgcttgatccggctacctgcccattcgaccaccaagcgaaacatcgcatcgagcgagcacgtactcggatggaagccggtcttgtcgatcaggatgatctggacgaagagcatcaggggctcgcgccagccgaactgttcgccaggctcaaggcgcgcatgcccgacggcgaggatctcgtcgtgacccatggcgatgcctgcttgccgaatatcatggtggaaaatggccgcttttctggattcatcgactgtggccggctgggtgtggcggaccgctatcaggacatagcgttggctacccgtgatattgctgaagagcttggcggcgaatgggctgaccgcttcctcgtgctttacggtatcgccgctcccgattcgcagcgcatcgccttctatcgccttcttgacgagttcttctgagcgggactctggggttcgaaatgaccgaccaagcgacgcccaacctgccatcacgagatttcgattccaccgccgccttctatgaaaggttgggcttcggaatcgttttccgggacgccggctggatgatcctccagcgcggggatctcatgctggagttcttcgcccaccccaacttgtttattgcagcttataatggttacaaataaagcaatagcatcacaaatttcacaaataaagcatttttttcactgcattctagttgtggtttgtccaaactcatcaatgtatcttatcatgtctgtataccgtcgacctctagctagagcttggcgtaatcatggtcatagctgtttcctgtgtgaaattgttatccgctcacaattccacacaacatacgagccggaagcataaagtgtaaagcctggggtgcctaatgagtgagctaactcacattaattgcgttgcgctcactgcccgctttccagtcgggaaacctgtcgtgccagctgcattaatgaatcggccaacgcgcggggagaggcggtttgcgtattgggcgctcttccgcttcctcgctcactgactcgctgcgctcggtcgttcggctgcggcgagcggtatcagctcactcaaaggcggtaatacggttatccacagaatcaggggataacgcaggaaagaacatgtgagcaaaaggccagcaaaaggccaggaaccgtaaaaaggccgcgttgctggcgtttttccataggctccgcccccctgacgagcatcacaaaaatcgacgctcaagtcagaggtggcgaaacccgacaggactataaagataccaggcgtttccccctggaagctccctcgtgcgctctcctgttccgaccctgccgcttaccggatacctgtccgcctttctcccttcgggaagcgtggcgctttctcatagctcacgctgtaggtatctcagttcggtgtaggtcgttcgctccaagctgggctgtgtgcacgaaccccccgttcagcccgaccgctgcgccttatccggtaactatcgtcttgagtccaacccggtaagacacgacttatcgccactggcagcagccactggtaacaggattagcagagcgaggtatgtaggcggtgctacagagttcttgaagtggtggcctaactacggctacactagaagaacagtatttggtatctgcgctctgctgaagccagttaccttcggaaaaagagttggtagctcttgatccggcaaacaaaccaccgctggtagcggtttttttgtttgcaagcagcagattacgcgcagaaaaaaaggatctcaagaagatcctttgatcttttctacggggtctgacgctcagtggaacgaaaactcacgttaagggattttggtcatgagattatcaaaaaggatcttcacctagatccttttaaattaaaaatgaagttttaaatcaatctaaagtatatatgagtaaacttggtctgacagttaccaatgcttaatcagtgaggcacctatctcagcgatctgtctatttcgttcatccatagttgcctgactccccgtcgtgtagataactacgatacgggagggcttaccatctggccccagtgctgcaatgataccgcgagacccacgctcaccggctccagatttatcagcaataaaccagccagccggaagggccgagcgcagaagtggtcctgcaactttatccgcctccatccagtctattaattgttgccgggaagctagagtaagtagttcgccagttaatagtttgcgcaacgttgttgccattgctacaggcatcgtggtgtcacgctcgtcgtttggtatggcttcattcagctccggttcccaacgatcaaggcgagttacatgatcccccatgttgtgcaaaaaagcggttagctccttcggtcctccgatcgttgtcagaagtaagttggccgcagtgttatcactcatggttatggcagcactgcataattctcttactgtcatgccatccgtaagatgcttttctgtgactggtgagtactcaaccaagtcattctgagaatagtgtatgcggcgaccgagttgctcttgcccggcgtcaatacgggataataccgcgccacatagcagaactttaaaagtgctcatcattggaaaacgttcttcggggcgaaaactctcaaggatcttaccgctgttgagatccagttcgatgtaacccactcgtgcacccaactgatcttcagcatcttttactttcaccagcgtttctgggtgagcaaaaacaggaaggcaaaatgccgcaaaaaagggaataagggcgacacggaaatgttgaatactcatactcttcctttttcaatattattgaagcatttatcagggttattgtctcatgagcggatacatatttgaatgtatttagaaaaataaacaaataggggttccgcgcacatttccccgaaaagtgccacctgacgtc

SEQ ID NO: 577 - DNA, 5978 bp, Artificial Sequence
  Description of Artificial Sequence: Synthetic polynucleotide
gacggatcgggagatctcccgatcccctatggtgcactctcagtacaatctgctctgatgccgcatagttaagccagtatctgctccctgcttgtgtgttggaggtcgctgagtagtgcgcgagcaaaatttaagctacaacaaggcaaggcttgaccgacaattgcatgaagaatctgcttagggttaggcgttttgcgctgcttcgcgatgtacgggccagatatacgcgttgacattgattattgactagttattaatagtaatcaattacggggtcattagttcatagcccatatatggagttccgcgttacataacttacggtaaatggcccgcctggctgaccgcccaacgacccccgcccattgacgtcaataatgacgtatgttcccatagtaacgccaatagggactttccattgacgtcaatgggtggagtatttacggtaaactgcccacttggcagtacatcaagtgtatcatatgccaagtacgccccctattgacgtcaatgacggtaaatggcccgcctggcattatgcccagtacatgaccttatgggactttcctacttggcagtacatctacgtattagtcatcgctattaccatggtgatgcggttttggcagtacatcaatgggcgtggatagcggtttgactcacggggatttccaagtctccaccccattgacgtcaatgggagtttgttttggcaccaaaatcaacgggactttccaaaatgtcgtaacaactccgccccattgacgcaaatgggcggtaggcgtgtacggtgggaggtctatataagcagagctctctggctaactagagaacccactgcttactggcttatcgaaattaatacgactcactatagggagacccaagctggctagcgtttaaacttaagcttggtaccgagctcggatccgccgccaccatggctttacttactgcggccgcccggctcttgggaaccaagaatgcatcttgtcttgttcttgcagcccggcatgctagtctgcgcaccgacatcgatgcgacctgcacgccccgccgcgcaagttcgaaccaacgtggcctcaaccagatttggaatgtcaaaaagcagagtgtctatttgatgaatttgaggaaatctggaactttgggccacccaggctctctagatgagaccacctatgaaagactagcagaggaaacgctggactctttagcagagttttttgaagaccttgcagacaagccatacacgtttgaggactatgatgtctcctttgggagtggtgtcttaactgtcaaactgggtggagatctaggaacctatgtgatcaacaagcagacgccaaacaagcaaatctggctatcttctccatccagtggacctaagcgttatgactggactgggaaaaactgggtgtactcccacgacggcgtgtccctccatgagctgctggccgcagagctcactaaagccttaaaaaccaaactggacttgtcttccttggcctattccggaaaagatgcttgactcgagtctagagggcccgtttaaacccgctgatcagcctcgactgtgccttctagttgccagccatctgttgtttgcccctcccccgtgccttccttgaccctggaaggtgccactcccactgtcctttcctaataaaatgaggaaattgcatcgcattgtctgagtaggtgtcattctattctggggggtggggtggggcaggacagcaagggggaggattgggaagacaatagcaggcatgctggggatgcggtgggctctatggcttctgaggcggaaagaaccagctggggctctagggggtatccccacgcgccctgtagcggcgcattaagcgcggcgggtgtggtggttacgcgcagcgtgaccgctacacttgccagcgccctagcgcccgctcctttcgctttcttcccttcctttctcgccacgttcgccggctttccccgtcaagctctaaatcgggggctccctttagggttccgatttagtgctttacggcacctcgaccccaaaaaacttgattagggtgatggttcacgtagtgggccatcgccctgatagacggtttttcgccctttgacgttggagtccacgttctttaatagtggactcttgttccaaactggaacaacactcaaccctatctcggtctattcttttgatttataagggattttgccgatttcggcctattggttaaaaaatgagctgatttaacaaaaatttaacgcgaattaattctgtggaatgtgtgtcagttagggtgtggaaagtccccaggctccccagcaggcagaagtatgcaaagcatgcatctcaattagtcagcaaccaggtgtggaaagtccccaggctccccagcaggcagaagtatgcaaagcatgcatctcaattagtcagcaaccatagtcccgcccctaactccgcccatcccgcccctaactccgcccagttccgcccattctccgccccatggctgactaattttttttatttatgcagaggccgaggccgcctctgcctctgagctattccagaagtagtgaggaggcttttttggaggcctaggcttttgcaaaaagctcccgggagcttgtatatccattttcggatctgatcaagagacaggatgaggatcgtttcgcatgattgaacaagatggattgcacgcaggttctccggccgcttgggtggagaggctattcggctatgactgggcacaacagacaatcggctgctctgatgccgccgtgttccggctgtcagcgcaggggcgcccggttctttttgtcaagaccgacctgtccggtgccctgaatgaactgcaggacgaggcagcgcggctatcgtggctggccacgacgggcgttccttgcgcagctgtgctcgacgttgtcactgaagcgggaagggactggctgctattgggcgaagtgccggggcaggatctcctgtcatctcaccttgctcctgccgagaaagtatccatcatggctgatgcaatgcggcggctgcatacgcttgatccggctacctgcccattcgaccaccaagcgaaacatcgcatcgagcgagcacgtactcggatggaagccggtcttgtcgatcaggatgatctggacgaagagcatcaggggctcgcgccagccgaactgttcgccaggctcaaggcgcgcatgcccgacggcgaggatctcgtcgtgacccatggcgatgcctgcttgccgaatatcatggtggaaaatggccgcttttctggattcatcgactgtggccggctgggtgtggcggaccgctatcaggacatagcgttggctacccgtgatattgctgaagagcttggcggcgaatgggctgaccgcttcctcgtgctttacggtatcgccgctcccgattcgcagcgcatcgccttctatcgccttcttgacgagttcttctgagcgggactctggggttcgaaatgaccgaccaagcgacgcccaacctgccatcacgagatttcgattccaccgccgccttctatgaaaggttgggcttcggaatcgttttccgggacgccggctggatgatcctccagcgcggggatctcatgctggagttcttcgcccaccccaacttgtttattgcagcttataatggttacaaataaagcaatagcatcacaaatttcacaaataaagcatttttttcactgcattctagttgtggtttgtccaaactcatcaatgtatcttatcatgtctgtataccgtcgacctctagctagagcttggcgtaatcatggtcatagctgtttcctgtgtgaaattgttatccgctcacaattccacacaacatacgagccggaagcataaagtgtaaagcctggggtgcctaatgagtgagctaactcacattaattgcgttgcgctcactgcccgctttccagtcgggaaacctgtcgtgccagctgcattaatgaatcggccaacgcgcggggagaggcggtttgcgtattgggcgctcttccgcttcctcgctcactgactcgctgcgctcggtcgttcggctgcggcgagcggtatcagctcactcaaaggcggtaatacggttatccacagaatcaggggataacgcaggaaagaacatgtgagcaaaaggccagcaaaaggccaggaaccgtaaaaaggccgcgttgctggcgtttttccataggctccgcccccctgacgagcatcacaaaaatcgacgctcaagtcagaggtggcgaaacccgacaggactataaagataccaggcgtttccccctggaagctccctcgtgcgctctcctgttccgaccctgccgcttaccggatacctgtccgcctttctcccttcgggaagcgtggcgctttctcatagctcacgctgtaggtatctcagttcggtgtaggtcgttcgctccaagctgggctgtgtgcacgaaccccccgttcagcccgaccgctgcgccttatccggtaactatcgtcttgagtccaacccggtaagacacgacttatcgccactggcagcagccactggtaacaggattagcagagcgaggtatgtaggcggtgctacagagttcttgaagtggtggcctaactacggctacactagaagaacagtatttggtatctgcgctctgctgaagccagttaccttcggaaaaagagttggtagctcttgatccggcaaacaaaccaccgctggtagcggtttttttgtttgcaagcagcagattacgcgcagaaaaaaaggatctcaagaagatcctttgatcttttctacggggtctgacgctcagtggaacgaaaactcacgttaagggattttggtcatgagattatcaaaaaggatcttcacctagatccttttaaattaaaaatgaagttttaaatcaatctaaagtatatatgagtaaacttggtctgacagttaccaatgcttaatcagtgaggcacctatctcagcgatctgtctatttcgttcatccatagttgcctgactccccgtcgtgtagataactacgatacgggagggcttaccatctggccccagtgctgcaatgataccgcgagacccacgctcaccggctccagatttatcagcaataaaccagccagccggaagggccgagcgcagaagtggtcctgcaactttatccgcctccatccagtctattaattgttgccgggaagctagagtaagtagttcgccagttaatagtttgcgcaacgttgttgccattgctacaggcatcgtggtgtcacgctcgtcgtttggtatggcttcattcagctccggttcccaacgatcaaggcgagttacatgatcccccatgttgtgcaaaaaagcggttagctccttcggtcctccgatcgttgtcagaagtaagttggccgcagtgttatcactcatggttatggcagcactgcataattctcttactgtcatgccatccgtaagatgcttttctgtgactggtgagtactcaaccaagtcattctgagaatagtgtatgcggcgaccgagttgctcttgcccggcgtcaatacgggataataccgcgccacatagcagaactttaaaagtgctcatcattggaaaacgttcttcggggcgaaaactctcaaggatcttaccgctgttgagatccagttcgatgtaacccactcgtgcacccaactgatcttcagcatcttttactttcaccagcgtttctgggtgagcaaaaacaggaaggcaaaatgccgcaaaaaagggaataagggcgacacggaaatgttgaatactcatactcttcctttttcaatattattgaagcatttatcagggttattgtctcatgagcggatacatatttgaatgtatttagaaaaataaacaaataggggttccgcgcacatttccccgaaaagtgccacctgacgtc

SEQ ID NO: 578 - DNA, 6020 bp, Artificial Sequence
  Description of Artificial Sequence: Synthetic polynucleotide
gacggatcgggagatctcccgatcccctatggtgcactctcagtacaatctgctctgatgccgcatagttaagccagtatctgctccctgcttgtgtgttggaggtcgctgagtagtgcgcgagcaaaatttaagctacaacaaggcaaggcttgaccgacaattgcatgaagaatctgcttagggttaggcgttttgcgctgcttcgcgatgtacgggccagatatacgcgttgacattgattattgactagttattaatagtaatcaattacggggtcattagttcatagcccatatatggagttccgcgttacataacttacggtaaatggcccgcctggctgaccgcccaacgacccccgcccattgacgtcaataatgacgtatgttcccatagtaacgccaatagggactttccattgacgtcaatgggtggagtatttacggtaaactgcccacttggcagtacatcaagtgtatcatatgccaagtacgccccctattgacgtcaatgacggtaaatggcccgcctggcattatgcccagtacatgaccttatgggactttcctacttggcagtacatctacgtattagtcatcgctattaccatggtgatgcggttttggcagtacatcaatgggcgtggatagcggtttgactcacggggatttccaagtctccaccccattgacgtcaatgggagtttgttttggcaccaaaatcaacgggactttccaaaatgtcgtaacaactccgccccattgacgcaaatgggcggtaggcgtgtacggtgggaggtctatataagcagagctctctggctaactagagaacccactgcttactggcttatcgaaattaatacgactcactatagggagacccaagctggctagcgtttaaacttaagcttggtaccgagctcggatcctccaccggtatgtggactctcgggcgccgcgcagtagccggcctcctggcgtcacccagcccagcccaggcccagaccctcacccgggtcccgcggccggcagagttggccccactctgcggccgccgtggcctgcgcaccgacatcgatgcgacctgcacgccccgccgcgcaagttcgaaccaacgtggcctcaaccagatttggaatgtcaaaaagcagagtgtctatttgatgaatttgaggaaatctggaactttgggccacccaggctctctagatgagaccacctatgaaagactagcagaggaaacgctggactctttagcagagttttttgaagaccttgcagacaagccatacacgtttgaggactatgatgtctcctttgggagtggtgtcttaactgtcaaactgggtggagatctaggaacctatgtgatcaacaagcagacgccaaacaagcaaatctggctatcttctccatccagtggacctaagcgttatgactggactgggaaaaactgggtgtactcccacgacggcgtgtccctccatgagctgctggccgcagagctcactaaagccttaaaaaccaaactggacttgtcttccttggcctattccggaaaagatgcttgactcgagtctagagggcccgtttaaacccgctgatcagcctcgactgtgccttctagttgccagccatctgttgtttgcccctcccccgtgccttccttgaccctggaaggtgccactcccactgtcctttcctaataaaatgaggaaattgcatcgcattgtctgagtaggtgtcattctattctggggggtggggtggggcaggacagcaagggggaggattgggaagacaatagcaggcatgctggggatgcggtgggctctatggcttctgaggcggaaagaaccagctggggctctagggggtatccccacgcgccctgtagcggcgcattaagcgcggcgggtgtggtggttacgcgcagcgtgaccgctacacttgccagcgccctagcgcccgctcctttcgctttcttcccttcctttctcgccacgttcgccggctttccccgtcaagctctaaatcgggggctccctttagggttccgatttagtgctttacggcacctcgaccccaaaaaacttgattagggtgatggttcacgtagtgggccatcgccctgatagacggtttttcgccctttgacgttggagtccacgttctttaatagtggactcttgttccaaactggaacaacactcaaccctatctcggtctattcttttgatttataagggattttgccgatttcggcctattggttaaaaaatgagctgatttaacaaaaatttaacgcgaattaattctgtggaatgtgtgtcagttagggtgtggaaagtccccaggctccccagcaggcagaagtatgcaaagcatgcatctcaattagtcagcaaccaggtgtggaaagtccccaggctccccagcaggcagaagtatgcaaagcatgcatctcaattagtcagcaaccatagtcccgcccctaactccgcccatcccgcccctaactccgcccagttccgcccattctccgccccatggctgactaattttttttatttatgcagaggccgaggccgcctctgcctctgagctattccagaagtagtgaggaggcttttttggaggcctaggcttttgcaaaaagctcccgggagcttgtatatccattttcggatctgatcaagagacaggatgaggatcgtttcgcatgattgaacaagatggattgcacgcaggttctccggccgcttgggtggagaggctattcggctatgactgggcacaacagacaatcggctgctctgatgccgccgtgttccggctgtcagcgcaggggcgcccggttctttttgtcaagaccgacctgtccggtgccctgaatgaactgcaggacgaggcagcgcggctatcgtggctggccacgacgggcgttccttgcgcagctgtgctcgacgttgtcactgaagcgggaagggactggctgctattgggcgaagtgccggggcaggatctcctgtcatctcaccttgctcctgccgagaaagtatccatcatggctgatgcaatgcggcggctgcatacgcttgatccggctacctgcccattcgaccaccaagcgaaacatcgcatcgagcgagcacgtactcggatggaagccggtcttgtcgatcaggatgatctggacgaagagcatcaggggctcgcgccagccgaactgttcgccaggctcaaggcgcgcatgcccgacggcgaggatctcgtcgtgacccatggcgatgcctgcttgccgaatatcatggtggaaaatggccgcttttctggattcatcgactgtggccggctgggtgtggcggaccgctatcaggacatagcgttggctacccgtgatattgctgaagagcttggcggcgaatgggctgaccgcttcctcgtgctttacggtatcgccgctcccgattcgcagcgcatcgccttctatcgccttcttgacgagttcttctgagcgggactctggggttcgaaatgaccgaccaagcgacgcccaacctgccatcacgagatttcgattccaccgccgccttctatgaaaggttgggcttcggaatcgttttccgggacgccggctggatgatcctccagcgcggggatctcatgctggagttcttcgcccaccccaacttgtttattgcagcttataatggttacaaataaagcaatagcatcacaaatttcacaaataaagcatttttttcactgcattctagttgtggtttgtccaaactcatcaatgtatcttatcatgtctgtataccgtcgacctctagctagagcttggcgtaatcatggtcatagctgtttcctgtgtgaaattgttatccgctcacaattccacacaacatacgagccggaagcataaagtgtaaagcctggggtgcctaatgagtgagctaactcacattaattgcgttgcgctcactgcccgctttccagtcgggaaacctgtcgtgccagctgcattaatgaatcggccaacgcgcggggagaggcggtttgcgtattgggcgctcttccgcttcctcgctcactgactcgctgcgctcggtcgttcggctgcggcgagcggtatcagctcactcaaaggcggtaatacggttatccacagaatcaggggataacgcaggaaagaacatgtgagcaaaaggccagcaaaaggccaggaaccgtaaaaaggccgcgttgctggcgtttttccataggctccgcccccctgacgagcatcacaaaaatcgacgctcaagtcagaggtggcgaaacccgacaggactataaagataccaggcgtttccccctggaagctccctcgtgcgctctcctgttccgaccctgccgcttaccggatacctgtccgcctttctcccttcgggaagcgtggcgctttctcatagctcacgctgtaggtatctcagttcggtgtaggtcgttcgctccaagctgggctgtgtgcacgaaccccccgttcagcccgaccgctgcgccttatccggtaactatcgtcttgagtccaacccggtaagacacgacttatcgccactggcagcagccactggtaacaggattagcagagcgaggtatgtaggcggtgctacagagttcttgaagtggtggcctaactacggctacactagaagaacagtatttggtatctgcgctctgctgaagccagttaccttcggaaaaagagttggtagctcttgatccggcaaacaaaccaccgctggtagcggtttttttgtttgcaagcagcagattacgcgcagaaaaaaaggatctcaagaagatcctttgatcttttctacggggtctgacgctcagtggaacgaaaactcacgttaagggattttggtcatgagattatcaaaaaggatcttcacctagatccttttaaattaaaaatgaagttttaaatcaatctaaagtatatatgagtaaacttggtctgacagttaccaatgcttaatcagtgaggcacctatctcagcgatctgtctatttcgttcatccatagttgcctgactccccgtcgtgtagataactacgatacgggagggcttaccatctggccccagtgctgcaatgataccgcgagacccacgctcaccggctccagatttatcagcaataaaccagccagccggaagggccgagcgcagaagtggtcctgcaactttatccgcctccatccagtctattaattgttgccgggaagctagagtaagtagttcgccagttaatagtttgcgcaacgttgttgccattgctacaggcatcgtggtgtcacgctcgtcgtttggtatggcttcattcagctccggttcccaacgatcaaggcgagttacatgatcccccatgttgtgcaaaaaagcggttagctccttcggtcctccgatcgttgtcagaagtaagttggccgcagtgttatcactcatggttatggcagcactgcataattctcttactgtcatgccatccgtaagatgcttttctgtgactggtgagtactcaaccaagtcattctgagaatagtgtatgcggcgaccgagttgctcttgcccggcgtcaatacgggataataccgcgccacatagcagaactttaaaagtgctcatcattggaaaacgttcttcggggcgaaaactctcaaggatcttaccgctgttgagatccagttcgatgtaacccactcgtgcacccaactgatcttcagcatcttttactttcaccagcgtttctgggtgagcaaaaacaggaaggcaaaatgccgcaaaaaagggaataagggcgacacggaaatgttgaatactcatactcttcctttttcaatattattgaagcatttatcagggttattgtctcatgagcggatacatatttgaatgtatttagaaaaataaacaaataggggttccgcgcacatttccccgaaaagtgccacctgacgtc

SEQ ID NO: 579 - DNA, 4703 bp, Artificial Sequence
  Description of Artificial Sequence: Synthetic polynucleotide
gccttaattaggctgcgcgctcgctcgctcactgaggccgcccgggcaaagcccgggcgtcgggcgacctttggtcgcccggcctcagtgagcgagcgagcgcgcagagagggagtggccaactccatcactaggggttccttgtagttaatgattaacccgccatgctacttatctaccagggtaatggggatcctctagaactatagctagtcgacattgattattgactagttattaatagtaatcaattacggggtcattagttcatagcccatatatggagttccgcgttacataacttacggtaaatggcccgcctggctgaccgcccaacgacccccgcccattgacgtcaataatgacgtatgttcccatagtaacgccaatagggactttccattgacgtcaatgggtggagtatttacggtaaactgcccacttggcagtacatcaagtgtatcatatgccaagtacgccccctattgacgtcaatgacggtaaatggcccgcctggcattatgcccagtacatgaccttatgggactttcctacttggcagtacatctacgtattagtcatcgctattaccatgtcgaggccacgttctgcttcactctccccatctcccccccctccccacccccaattttgtatttatttattttttaattattttgtgcagcgatgggggcggggggggggggcgcgcgccaggcggggcggggcggggcgaggggcggggcggggcgaggcggagaggtgcggcggcagccaatcagagcggcgcgctccgaaagtttccttttatggcgaggcggcggcggcggcggccctataaaaagcgaagcgcgcggcgggcgggagcaagcttgccgccaccatgtggactctcgggcgccgcgcagtagccggcctcctggcgtcacccagcccggcccaggcccagaccctcacccgggtcccgcggccggcagagttggccccactctgcggccgccgtggcctgcgcaccgacatcgatgcgacctgcacgccccgccgcgcaagttcgaaccaacgtggcctcaaccagatttggaatgtcaaaaagcagagtgtctatttgatgaatttgaggaaatctggaactttgggccacccaggctctctagatgagaccacctatgaaagactagcagaggaaacgctggactctttagcagagttttttgaagaccttgcagacaagccatacacgtttgaggactatgatgtctcctttgggagtggtgtcttaactgtcaaactgggtggagatctaggaacctatgtgatcaacaagcagacgccaaacaagcaaatctggctatcttctccatccagtggacctaagcgttatgactggactgggaaaaactgggtgttctcccacgacggcgtgtccctccatgagctgctggccgcagagctcactaaagccttaaaaaccaaactggacttgtcttggttggcctattccggaaaagatgcttgactcgaggacggggtgaactacgcctgaggatccgatctttttccctctgccaaaaattatggggacatcatgaagccccttgagcatctgacttctggctaataaaggaaatttattttcattgcaatagtgtgttggaattttttgtgtctctcactcggaagcaattcgttgatctgaatttcgaccacccataatacccattaccctggtagataagtagcatggcgggttaatcattaactacaaggaacccctagtgatggagttggccactccctctctgcgcgctcgctcgctcactgaggccgggcgaccaaaggtcgcccgacgcccgggctttgcccgggcggcctcagtgagcgagcgagcgcgcagccttaattaacctaattcactggccgtcgttttacaacgtcgtgactgggaaaaccctggcgttacccaacttaatcgccttgcagcacatccccctttcgccagctggcgtaatagcgaagaggcccgcaccgatcgcccttcccaacagttgcgcagcctgaatggcgaatgggacgcgccctgtagcggcgcattaagcgcggcgggtgtggtggttacgcgcagcgtgaccgctacacttgccagcgccctagcgcccgctcctttcgctttcttcccttcctttctcgccacgttcgccggctttccccgtcaagctctaaatcgggggctccctttagggttccgatttagtgctttacggcacctcgaccccaaaaaacttgattagggtgatggttcacgtagtgggccatcgccctgatagacggtttttcgccctttgacgttggagtccacgttctttaatagtggactcttgttccaaactggaacaacactcaaccctatctcggtctattcttttgatttataagggattttgccgatttcggcctattggttaaaaaatgagctgatttaacaaaaatttaacgcgaattttaacaaaatattaacgcttacaatttaggtggcacttttcggggaaatgtgcgcggaacccctatttgtttatttttctaaatacattcaaatatgtatccgctcatgagacaataaccctgataaatgcttcaataatattgaaaaaggaagagtatgagtattcaacatttccgtgtcgcccttattcccttttttgcggcattttgccttcctgtttttgctcacccagaaacgctggtgaaagtaaaagatgctgaagatcagttgggtgcacgagtgggttacatcgaactggatctcaacagcggtaagatccttgagagttttcgccccgaagaacgttttccaatgatgagcacttttaaagttctgctatgtggcgcggtattatcccgtattgacgccgggcaagagcaactcggtcgccgcatacactattctcagaatgacttggttgagtactcaccagtcacagaaaagcatcttacggatggcatgacagtaagagaattatgcagtgctgccataaccatgagtgataacactgcggccaacttacttctgacaacgatcggaggaccgaaggagctaaccgcttttttgcacaacatgggggatcatgtaactcgccttgatcgttgggaaccggagctgaatgaagccataccaaacgacgagcgtgacaccacgatgcctgtagcaatggcaacaacgttgcgcaaactattaactggcgaactacttactctagcttcccggcaacaattaatagactggatggaggcggataaagttgcaggaccacttctgcgctcggcccttccggctggctggtttattgctgataaatctggagccggtgagcgtgggtctcgcggtatcattgcagcactggggccagatggtaagccctcccgtatcgtagttatctacacgacggggagtcaggcaactatggatgaacgaaatagacagatcgctgagataggtgcctcactgattaagcattggtaactgtcagaccaagtttactcatatatactttagattgatttaaaacttcatttttaatttaaaaggatctaggtgaagatcctttttgataatctcatgaccaaaatcccttaacgtgagttttcgttccactgagcgtcagaccccgtagaaaagatcaaaggatcttcttgagatcctttttttctgcgcgtaatctgctgcttgcaaacaaaaaaaccaccgctaccagcggtggtttgtttgccggatcaagagctaccaactctttttccgaaggtaactggcttcagcagagcgcagataccaaatactgttcttctagtgtagccgtagttaggccaccacttcaagaactctgtagcaccgcctacatacctcgctctgctaatcctgttaccagtggctgctgccagtggcgataagtcgtgtcttaccgggttggactcaagacgatagttaccggataaggcgcagcggtcgggctgaacggggggttcgtgcacacagcccagcttggagcgaacgacctacaccgaactgagatacctacagcgtgagctatgagaaagcgccacgcttcccgaagggagaaaggcggacaggtatccggtaagcggcagggtcggaacaggagagcgcacgagggagcttccagggggaaacgcctggtatctttatagtcctgtcgggtttcgccacctctgacttgagcgtcgatttttgtgatgctcgtcaggggggcggagcctatggaaaaacgccagcaacgcggcctttttacggttcctggccttttgctggccttttgctcacatgttctttcctgcgttatcccctgattctgtggataaccgtattaccgcctttgagtgagctgataccgctcgccgcagccgaacgaccgagcgcagcgagtcagtgagcgaggaagcggaagagcgcccaatacgcaaaccgcctctccccgcgcgttggccgattcattaatgcagctggcacgacaggtttcccgactggaaagcgggcagtgagcgcaacgcaattaatgtgagttagctcactcattaggcaccccaggctttacactttatgcttccggctcgtatgttgtgtggaattgtgagcggataacaatttcacacaggaaacagctatgaccatgattacgccagatttaattaag

SEQ ID NO: 580 - DNA, 4945 bp, Artificial Sequence
  Description of Artificial Sequence: Synthetic polynucleotide
gccttaattaggctgcgcgctcgctcgctcactgaggccgcccgggcaaagcccgggcgtcgggcgacctttggtcgcccggcctcagtgagcgagcgagcgcgcagagagggagtggccaactccatcactaggggttccttgtagttaatgattaacccgccatgctacttatctaccagggtaatggggatcctctagaactatagctagtcgacattgattattgactagttattaatagtaatcaattacggggtcattagttcatagcccatatatggagttccgcgttacataacttacggtaaatggcccgcctggctgaccgcccaacgacccccgcccattgacgtcaataatgacgtatgttcccatagtaacgccaatagggactttccattgacgtcaatgggtggagtatttacggtaaactgcccacttggcagtacatcaagtgtatcatatgccaagtacgccccctattgacgtcaatgacggtaaatggcccgcctggcattatgcccagtacatgaccttatgggactttcctacttggcagtacatctacgtattagtcatcgctattaccatgtcgaggccacgttctgcttcactctccccatctcccccccctccccacccccaattttgtatttatttattttttaattattttgtgcagcgatgggggcggggggggggggcgcgcgccaggcggggcggggcggggcgaggggcggggcggggcgaggcggagaggtgcggcggcagccaatcagagcggcgcgctccgaaagtttccttttatggcgaggcggcggcggcggcggccctataaaaagcgaagcgcgcggcgggcgggagcaagcttggagtcgctgcgttgccttcgccccgtgccccgctccgcgccgcctcgcgccgcccgccccggctctgactgaccgcgttactcccacaggtgagcgggcgggacggcccttctcctccgggctgtaattagcaagaggtaagggtttaagggatggttggttggtggggtattaatgtttaattacctgttttacaggcctgaaatcacttggttttaggttgggcggccgatccaccggtgccgccaccatgtggactctcgggcgccgcgcagtagccggcctcctggcgtcacccagcccggcccaggcccagaccctcacccgggtcccgcggccggcagagttggccccactctgcggccgccgtggcctgcgcaccgacatcgatgcgacctgcacgccccgccgcgcaagttcgaaccaacgtggcctcaaccagatttggaatgtcaaaaagcagagtgtctatttgatgaatttgaggaaatctggaactttgggccacccaggctctctagatgagaccacctatgaaagactagcagaggaaacgctggactctttagcagagttttttgaagaccttgcagacaagccatacacgtttgaggactatgatgtctcctttgggagtggtgtcttaactgtcaaactgggtggagatctaggaacctatgtgatcaacaagcagacgccaaacaagcaaatctggctatcttctccatccagtggacctaagcgttatgactggactgggaaaaactgggtgttctcccacgacggcgtgtccctccatgagctgctggccgcagagctcactaaagccttaaaaaccaaactggacttgtcttggttggcctattccggaaaagatgcttgactcgaggacggggtgaactacgcctgaggatccgatctttttccctctgccaaaaattatggggacatcatgaagccccttgagcatctgacttctggctaataaaggaaatttattttcattgcaatagtgtgttggaattttttgtgtctctcactcggaagcaattcgttgatctgaatttcgaccacccataatacccattaccctggtagataagtagcatggcgggttaatcattaactacaaggaacccctagtgatggagttggccactccctctctgcgcgctcgctcgctcactgaggccgggcgaccaaaggtcgcccgacgcccgggctttgcccgggcggcctcagtgagcgagcgagcgcgcagccttaattaacctaattcactggccgtcgttttacaacgtcgtgactgggaaaaccctggcgttacccaacttaatcgccttgcagcacatccccctttcgccagctggcgtaatagcgaagaggcccgcaccgatcgcccttcccaacagttgcgcagcctgaatggcgaatgggacgcgccctgtagcggcgcattaagcgcggcgggtgtggtggttacgcgcagcgtgaccgctacacttgccagcgccctagcgcccgctcctttcgctttcttcccttcctttctcgccacgttcgccggctttccccgtcaagctctaaatcgggggctccctttagggttccgatttagtgctttacggcacctcgaccccaaaaaacttgattagggtgatggttcacgtagtgggccatcgccctgatagacggtttttcgccctttgacgttggagtccacgttctttaatagtggactcttgttccaaactggaacaacactcaaccctatctcggtctattcttttgatttataagggattttgccgatttcggcctattggttaaaaaatgagctgatttaacaaaaatttaacgcgaattttaacaaaatattaacgcttacaatttaggtggcacttttcggggaaatgtgcgcggaacccctatttgtttatttttctaaatacattcaaatatgtatccgctcatgagacaataaccctgataaatgcttcaataatattgaaaaaggaagagtatgagtattcaacatttccgtgtcgcccttattcccttttttgcggcattttgccttcctgtttttgctcacccagaaacgctggtgaaagtaaaagatgctgaagatcagttgggtgcacgagtgggttacatcgaactggatctcaacagcggtaagatccttgagagttttcgccccgaagaacgttttccaatgatgagcacttttaaagttctgctatgtggcgcggtattatcccgtattgacgccgggcaagagcaactcggtcgccgcatacactattctcagaatgacttggttgagtactcaccagtcacagaaaagcatcttacggatggcatgacagtaagagaattatgcagtgctgccataaccatgagtgataacactgcggccaacttacttctgacaacgatcggaggaccgaaggagctaaccgcttttttgcacaacatgggggatcatgtaactcgccttgatcgttgggaaccggagctgaatgaagccataccaaacgacgagcgtgacaccacgatgcctgtagcaatggcaacaacgttgcgcaaactattaactggcgaactacttactctagcttcccggcaacaattaatagactggatggaggcggataaagttgcaggaccacttctgcgctcggcccttccggctggctggtttattgctgataaatctggagccggtgagcgtgggtctcgcggtatcattgcagcactggggccagatggtaagccctcccgtatcgtagttatctacacgacggggagtcaggcaactatggatgaacgaaatagacagatcgctgagataggtgcctcactgattaagcattggtaactgtcagaccaagtttactcatatatactttagattgatttaaaacttcatttttaatttaaaaggatctaggtgaagatcctttttgataatctcatgaccaaaatcccttaacgtgagttttcgttccactgagcgtcagaccccgtagaaaagatcaaaggatcttcttgagatcctttttttctgcgcgtaatctgctgcttgcaaacaaaaaaaccaccgctaccagcggtggtttgtttgccggatcaagagctaccaactctttttccgaaggtaactggcttcagcagagcgcagataccaaatactgttcttctagtgtagccgtagttaggccaccacttcaagaactctgtagcaccgcctacatacctcgctctgctaatcctgttaccagtggctgctgccagtggcgataagtcgtgtcttaccgggttggactcaagacgatagttaccggataaggcgcagcggtcgggctgaacggggggttcgtgcacacagcccagcttggagcgaacgacctacaccgaactgagatacctacagcgtgagctatgagaaagcgccacgcttcccgaagggagaaaggcggacaggtatccggtaagcggcagggtcggaacaggagagcgcacgagggagcttccagggggaaacgcctggtatctttatagtcctgtcgggtttcgccacctctgacttgagcgtcgatttttgtgatgctcgtcaggggggcggagcctatggaaaaacgccagcaacgcggcctttttacggttcctggccttttgctggccttttgctcacatgttctttcctgcgttatcccctgattctgtggataaccgtattaccgcctttgagtgagctgataccgctcgccgcagccgaacgaccgagcgcagcgagtcagtgagcgaggaagcggaagagcgcccaatacgcaaaccgcctctccccgcgcgttggccgattcattaatgcagctggcacgacaggtttcccgactggaaagcgggcagtgagcgcaacgcaattaatgtgagttagctcactcattaggcaccccaggctttacactttatgcttccggctcgtatgttgtgtggaattgtgagcggataacaatttcacacaggaaacagctatgaccatgattacgccagatttaattaag

SEQ ID NO: 581 - DNA, 4883 bp, Artificial Sequence
  Description of Artificial Sequence: Synthetic polynucleotide
gccttaattaggctgcgcgctcgctcgctcactgaggccgcccgggcaaagcccgggcgtcgggcgacctttggtcgcccggcctcagtgagcgagcgagcgcgcagagagggagtggccaactccatcactaggggttccttgtagttaatgattaacccgccatgctacttatctaccagggtaatggggatcctctagaactatagctagtcgacattgattattgactagttattaatagtaatcaattacggggtcattagttcatagcccatatatggagttccgcgttacataacttacggtaaatggcccgcctggctgaccgcccaacgacccccgcccattgacgtcaataatgacgtatgttcccatagtaacgccaatagggactttccattgacgtcaatgggtggagtatttacggtaaactgcccacttggcagtacatcaagtgtatcatatgccaagtacgccccctattgacgtcaatgacggtaaatggcccgcctggcattatgcccagtacatgaccttatgggactttcctacttggcagtacatctacgtattagtcatcgctattaccatgtcgaggccacgttctgcttcactctccccatctcccccccctccccacccccaattttgtatttatttattttttaattattttgtgcagcgatgggggcggggggggggggcgcgcgccaggcggggcggggcggggcgaggggcggggcggggcgaggcggagaggtgcggcggcagccaatcagagcggcgcgctccgaaagtttccttttatggcgaggcggcggcggcggcggccctataaaaagcgaagcgcgcggcgggcgggagcaagcttgaactgaaaaaccagaaagttaactggtaagtttagtctttttgtcttttatttcaggtcccggatccggtggtggtgcaaatcaaagaactgctcctcagtggatgttgcctttacttctaggcctgtacggaagtgttacttctgctctaaaagctgcggaattgtacccgcggccgatccaccggtatgtggactctcgggcgccgcgcagtagccggcctcctggcgtcacccagcccggcccaggcccagaccctcacccgggtcccgcggccggcagagttggccccactctgcggccgccgtggcctgcgcaccgacatcgatgcgacctgcacgccccgccgcgcaagttcgaaccaacgtggcctcaaccagatttggaatgtcaaaaagcagagtgtctatttgatgaatttgaggaaatctggaactttgggccacccaggctctctagatgagaccacctatgaaagactagcagaggaaacgctggactctttagcagagttttttgaagaccttgcagacaagccatacacgtttgaggactatgatgtctcctttgggagtggtgtcttaactgtcaaactgggtggagatctaggaacctatgtgatcaacaagcagacgccaaacaagcaaatctggctatcttctccatccagtggacctaagcgttatgactggactgggaaaaactgggtgttctcccacgacggcgtgtccctccatgagctgctggccgcagagctcactaaagccttaaaaaccaaactggacttgtcttggttggcctattccggaaaagatgcttgactcgaggacggggtgaactacgcctgaggatccgatctttttccctctgccaaaaattatggggacatcatgaagccccttgagcatctgacttctggctaataaaggaaatttattttcattgcaatagtgtgttggaattttttgtgtctctcactcggaagcaattcgttgatctgaatttcgaccacccataatacccattaccctggtagataagtagcatggcgggttaatcattaactacaaggaacccctagtgatggagttggccactccctctctgcgcgctcgctcgctcactgaggccgggcgaccaaaggtcgcccgacgcccgggctttgcccgggcggcctcagtgagcgagcgagcgcgcagccttaattaacctaattcactggccgtcgttttacaacgtcgtgactgggaaaaccctggcgttacccaacttaatcgccttgcagcacatccccctttcgccagctggcgtaatagcgaagaggcccgcaccgatcgcccttcccaacagttgcgcagcctgaatggcgaatgggacgcgccctgtagcggcgcattaagcgcggcgggtgtggtggttacgcgcagcgtgaccgctacacttgccagcgccctagcgcccgctcctttcgctttcttcccttcctttctcgccacgttcgccggctttccccgtcaagctctaaatcgggggctccctttagggttccgatttagtgctttacggcacctcgaccccaaaaaacttgattagggtgatggttcacgtagtgggccatcgccctgatagacggtttttcgccctttgacgttggagtccacgttctttaatagtggactcttgttccaaactggaacaacactcaaccctatctcggtctattcttttgatttataagggattttgccgatttcggcctattggttaaaaaatgagctgatttaacaaaaatttaacgcgaattttaacaaaatattaacgcttacaatttaggtggcacttttcggggaaatgtgcgcggaacccctatttgtttatttttctaaatacattcaaatatgtatccgctcatgagacaataaccctgataaatgcttcaataatattgaaaaaggaagagtatgagtattcaacatttccgtgtcgcccttattcccttttttgcggcattttgccttcctgtttttgctcacccagaaacgctggtgaaagtaaaagatgctgaagatcagttgggtgcacgagtgggttacatcgaactggatctcaacagcggtaagatccttgagagttttcgccccgaagaacgttttccaatgatgagcacttttaaagttctgctatgtggcgcggtattatcccgtattgacgccgggcaagagcaactcggtcgccgcatacactattctcagaatgacttggttgagtactcaccagtcacagaaaagcatcttacggatggcatgacagtaagagaattatgcagtgctgccataaccatgagtgataacactgcggccaacttacttctgacaacgatcggaggaccgaaggagctaaccgcttttttgcacaacatgggggatcatgtaactcgccttgatcgttgggaaccggagctgaatgaagccataccaaacgacgagcgtgacaccacgatgcctgtagcaatggcaacaacgttgcgcaaactattaactggcgaactacttactctagcttcccggcaacaattaatagactggatggaggcggataaagttgcaggaccacttctgcgctcggcccttccggctggctggtttattgctgataaatctggagccggtgagcgtgggtctcgcggtatcattgcagcactggggccagatggtaagccctcccgtatcgtagttatctacacgacggggagtcaggcaactatggatgaacgaaatagacagatcgctgagataggtgcctcactgattaagcattggtaactgtcagaccaagtttactcatatatactttagattgatttaaaacttcatttttaatttaaaaggatctaggtgaagatcctttttgataatctcatgaccaaaatcccttaacgtgagttttcgttccactgagcgtcagaccccgtagaaaagatcaaaggatcttcttgagatcctttttttctgcgcgtaatctgctgcttgcaaacaaaaaaaccaccgctaccagcggtggtttgtttgccggatcaagagctaccaactctttttccgaaggtaactggcttcagcagagcgcagataccaaatactgttcttctagtgtagccgtagttaggccaccacttcaagaactctgtagcaccgcctacatacctcgctctgctaatcctgttaccagtggctgctgccagtggcgataagtcgtgtcttaccgggttggactcaagacgatagttaccggataaggcgcagcggtcgggctgaacggggggttcgtgcacacagcccagcttggagcgaacgacctacaccgaactgagatacctacagcgtgagctatgagaaagcgccacgcttcccgaagggagaaaggcggacaggtatccggtaagcggcagggtcggaacaggagagcgcacgagggagcttccagggggaaacgcctggtatctttatagtcctgtcgggtttcgccacctctgacttgagcgtcgatttttgtgatgctcgtcaggggggcggagcctatggaaaaacgccagcaacgcggcctttttacggttcctggccttttgctggccttttgctcacatgttctttcctgcgttatcccctgattctgtggataaccgtattaccgcctttgagtgagctgataccgctcgccgcagccgaacgaccgagcgcagcgagtcagtgagcgaggaagcggaagagcgcccaatacgcaaaccgcctctccccgcgcgttggccgattcattaatgcagctggcacgacaggtttcccgactggaaagcgggcagtgagcgcaacgcaattaatgtgagttagctcactcattaggcaccccaggctttacactttatgcttccggctcgtatgttgtgtggaattgtgagcggataacaatttcacacaggaaacagctatgaccatgattacgccagatttaattaag

SEQ ID NO: 582 - DNA, 4883 bp, Artificial Sequence
  Description of Artificial Sequence: Synthetic polynucleotide
gccttaattaggctgcgcgctcgctcgctcactgaggccgcccgggcaaagcccgggcgtcgggcgacctttggtcgcccggcctcagtgagcgagcgagcgcgcagagagggagtggccaactccatcactaggggttccttgtagttaatgattaacccgccatgctacttatctaccagggtaatggggatcctctagaactatagctagtcgacattgattattgactagttattaatagtaatcaattacggggtcattagttcatagcccatatatggagttccgcgttacataacttacggtaaatggcccgcctggctgaccgcccaacgacccccgcccattgacgtcaataatgacgtatgttcccatagtaacgccaatagggactttccattgacgtcaatgggtggagtatttacggtaaactgcccacttggcagtacatcaagtgtatcatatgccaagtacgccccctattgacgtcaatgacggtaaatggcccgcctggcattatgcccagtacatgaccttatgggactttcctacttggcagtacatctacgtattagtcatcgctattaccatgtcgaggccacgttctgcttcactctccccatctcccccccctccccacccccaattttgtatttatttattttttaattattttgtgcagcgatgggggcggggggggggggcgcgcgccaggcggggcggggcggggcgaggggcggggcggggcgaggcggagaggtgcggcggcagccaatcagagcggcgcgctccgaaagtttccttttatggcgaggcggcggcggcggcggccctataaaaagcgaagcgcgcggcgggcgggagcaagcttgaactgaaaaaccagaaagttaactggtaagtttagtctttttgtcttttatttcaggtcccggatccggtggtggtgcaaatcaaagaactgctcctcagtggatgttgcctttacttctaggcctgtacggaagtgttacttctgctctaaaagctgcggaattgtacccgcggccgatccaccggtatgtggaccctgggccggcgggctgtggccggcctgttggcctctcccagccctgctcaagcccagacactgacccgggtcccccgacccgcagagctcgctcctctgtgcggacggcgggggctgagaacagacattgacgcaacctgcaccccacggagagcttcatcaaaccaacgcggactcaatcagatctggaatgtcaagaagcagtctgtatatttgatgaatctgcgcaaatccggaaccttgggacatcctggaagccttgatgagaccacatacgaacggctcgctgaagagacattggacagtctggctgagttctttgaggacctcgcggataagccatatacatttgaagactatgatgtttcttttggctcaggggtactgacagtgaaactgggaggggatctggggacctatgtcatcaataagcaaacacccaacaaacagatctggctgtcatccccaagcagcgggcccaagcgctatgattggacagggaaaaactgggtctattcccatgacggggtatccctgcacgaactgcttgcggcggaacttactaaggccctgaagacaaagctggacctgtcttcacttgcctacagtggtaaagatgcgtaactcgaggacggggtgaactacgcctgaggatccgatctttttccctctgccaaaaattatggggacatcatgaagccccttgagcatctgacttctggctaataaaggaaatttattttcattgcaatagtgtgttggaattttttgtgtctctcactcggaagcaattcgttgatctgaatttcgaccacccataatacccattaccctggtagataagtagcatggcgggttaatcattaactacaaggaacccctagtgatggagttggccactccctctctgcgcgctcgctcgctcactgaggccgggcgaccaaaggtcgcccgacgcccgggctttgcccgggcggcctcagtgagcgagcgagcgcgcagccttaattaacctaattcactggccgtcgttttacaacgtcgtgactgggaaaaccctggcgttacccaacttaatcgccttgcagcacatccccctttcgccagctggcgtaatagcgaagaggcccgcaccgatcgcccttcccaacagttgcgcagcctgaatggcgaatgggacgcgccctgtagcggcgcattaagcgcggcgggtgtggtggttacgcgcagcgtgaccgctacacttgccagcgccctagcgcccgctcctttcgctttcttcccttcctttctcgccacgttcgccggctttccccgtcaagctctaaatcgggggctccctttagggttccgatttagtgctttacggcacctcgaccccaaaaaacttgattagggtgatggttcacgtagtgggccatcgccctgatagacggtttttcgccctttgacgttggagtccacgttctttaatagtggactcttgttccaaactggaacaacactcaaccctatctcggtctattcttttgatttataagggattttgccgatttcggcctattggttaaaaaatgagctgatttaacaaaaatttaacgcgaattttaacaaaatattaacgcttacaatttaggtggcacttttcggggaaatgtgcgcggaacccctatttgtttatttttctaaatacattcaaatatgtatccgctcatgagacaataaccctgataaatgcttcaataatattgaaaaaggaagagtatgagtattcaacatttccgtgtcgcccttattcccttttttgcggcattttgccttcctgtttttgctcacccagaaacgctggtgaaagtaaaagatgctgaagatcagttgggtgcacgagtgggttacatcgaactggatctcaacagcggtaagatccttgagagttttcgccccgaagaacgttttccaatgatgagcacttttaaagttctgctatgtggcgcggtattatcccgtattgacgccgggcaagagcaactcggtcgccgcatacactattctcagaatgacttggttgagtactcaccagtcacagaaaagcatcttacggatggcatgacagtaagagaattatgcagtgctgccataaccatgagtgataacactgcggccaacttacttctgacaacgatcggaggaccgaaggagctaaccgcttttttgcacaacatgggggatcatgtaactcgccttgatcgttgggaaccggagctgaatgaagccataccaaacgacgagcgtgacaccacgatgcctgtagcaatggcaacaacgttgcgcaaactattaactggcgaactacttactctagcttcccggcaacaattaatagactggatggaggcggataaagttgcaggaccacttctgcgctcggcccttccggctggctggtttattgctgataaatctggagccggtgagcgtgggtctcgcggtatcattgcagcactggggccagatggtaagccctcccgtatcgtagttatctacacgacggggagtcaggcaactatggatgaacgaaatagacagatcgctgagataggtgcctcactgattaagcattggtaactgtcagaccaagtttactcatatatactttagattgatttaaaacttcatttttaatttaaaaggatctaggtgaagatcctttttgataatctcatgaccaaaatcccttaacgtgagttttcgttccactgagcgtcagaccccgtagaaaagatcaaaggatcttcttgagatcctttttttctgcgcgtaatctgctgcttgcaaacaaaaaaaccaccgctaccagcggtggtttgtttgccggatcaagagctaccaactctttttccgaaggtaactggcttcagcagagcgcagataccaaatactgttcttctagtgtagccgtagttaggccaccacttcaagaactctgtagcaccgcctacatacctcgctctgctaatcctgttaccagtggctgctgccagtggcgataagtcgtgtcttaccgggttggactcaagacgatagttaccggataaggcgcagcggtcgggctgaacggggggttcgtgcacacagcccagcttggagcgaacgacctacaccgaactgagatacctacagcgtgagctatgagaaagcgccacgcttcccgaagggagaaaggcggacaggtatccggtaagcggcagggtcggaacaggagagcgcacgagggagcttccagggggaaacgcctggtatctttatagtcctgtcgggtttcgccacctctgacttgagcgtcgatttttgtgatgctcgtcaggggggcggagcctatggaaaaacgccagcaacgcggcctttttacggttcctggccttttgctggccttttgctcacatgttctttcctgcgttatcccctgattctgtggataaccgtattaccgcctttgagtgagctgataccgctcgccgcagccgaacgaccgagcgcagcgagtcagtgagcgaggaagcggaagagcgcccaatacgcaaaccgcctctccccgcgcgttggccgattcattaatgcagctggcacgacaggtttcccgactggaaagcgggcagtgagcgcaacgcaattaatgtgagttagctcactcattaggcaccccaggctttacactttatgcttccggctcgtatgttgtgtggaattgtgagcggataacaatttcacacaggaaacagctatgaccatgattacgccagatttaattaag

SEQ ID NO: 583 - DNA, 4883 bp, Artificial Sequence
  Description of Artificial Sequence: Synthetic polynucleotide
gccttaattaggctgcgcgctcgctcgctcactgaggccgcccgggcaaagcccgggcgtcgggcgacctttggtcgcccggcctcagtgagcgagcgagcgcgcagagagggagtggccaactccatcactaggggttccttgtagttaatgattaacccgccatgctacttatctaccagggtaatggggatcctctagaactatagctagtcgacattgattattgactagttattaatagtaatcaattacggggtcattagttcatagcccatatatggagttccgcgttacataacttacggtaaatggcccgcctggctgaccgcccaacgacccccgcccattgacgtcaataatgacgtatgttcccatagtaacgccaatagggactttccattgacgtcaatgggtggagtatttacggtaaactgcccacttggcagtacatcaagtgtatcatatgccaagtacgccccctattgacgtcaatgacggtaaatggcccgcctggcattatgcccagtacatgaccttatgggactttcctacttggcagtacatctacgtattagtcatcgctattaccatgtcgaggccacgttctgcttcactctccccatctcccccccctccccacccccaattttgtatttatttattttttaattattttgtgcagcgatgggggcggggggggggggcgcgcgccaggcggggcggggcggggcgaggggcggggcggggcgaggcggagaggtgcggcggcagccaatcagagcggcgcgctccgaaagtttccttttatggcgaggcggcggcggcggcggccctataaaaagcgaagcgcgcggcgggcgggagcaagcttgaactgaaaaaccagaaagttaactggtaagtttagtctttttgtcttttatttcaggtcccggatccggtggtggtgcaaatcaaagaactgctcctcagtggatgttgcctttacttctaggcctgtacggaagtgttacttctgctctaaaagctgcggaattgtacccgcggccgatccaccggtatgtggactctgggtcgcagagcggtggcaggcttgctggcatctccgtccccggctcaggcccagaccctgacacgggtgcccaggccggccgagctggctcctctgtgcggccggcgcggccttagaacagacattgacgcaacctgcacccccagaagagccagttccaaccagcgcgggttgaatcagatctggaacgtcaagaagcagagtgtgtaccttatgaatctccggaaaagtggcaccctcggacaccccggatccctcgatgaaaccacttatgagcgcctggccgaggaaaccctggattccctggctgagttcttcgaggacctggctgacaaaccctacaccttcgaagactacgacgtttccttcggaagtggggtgctgacggtcaaacttggtggcgatcttggaacctatgttataaacaagcagactcccaacaaacagatctggctcagctctccaagttcaggacccaagaggtatgactggacgggcaagaattgggtctattctcacgacggagtgagccttcatgaactgttggctgccgaactgacaaaagcccttaagacgaaactggacctgtcctcattggcgtactctggtaaggatgcctaactcgaggacggggtgaactacgcctgaggatccgatctttttccctctgccaaaaattatggggacatcatgaagccccttgagcatctgacttctggctaataaaggaaatttattttcattgcaatagtgtgttggaattttttgtgtctctcactcggaagcaattcgttgatctgaatttcgaccacccataatacccattaccctggtagataagtagcatggcgggttaatcattaactacaaggaacccctagtgatggagttggccactccctctctgcgcgctcgctcgctcactgaggccgggcgaccaaaggtcgcccgacgcccgggctttgcccgggcggcctcagtgagcgagcgagcgcgcagccttaattaacctaattcactggccgtcgttttacaacgtcgtgactgggaaaaccctggcgttacccaacttaatcgccttgcagcacatccccctttcgccagctggcgtaatagcgaagaggcccgcaccgatcgcccttcccaacagttgcgcagcctgaatggcgaatgggacgcgccctgtagcggcgcattaagcgcggcgggtgtggtggttacgcgcagcgtgaccgctacacttgccagcgccctagcgcccgctcctttcgctttcttcccttcctttctcgccacgttcgccggctttccccgtcaagctctaaatcgggggctccctttagggttccgatttagtgctttacggcacctcgaccccaaaaaacttgattagggtgatggttcacgtagtgggccatcgccctgatagacggtttttcgccctttgacgttggagtccacgttctttaatagtggactcttgttccaaactggaacaacactcaaccctatctcggtctattcttttgatttataagggattttgccgatttcggcctattggttaaaaaatgagctgatttaacaaaaatttaacgcgaattttaacaaaatattaacgcttacaatttaggtggcacttttcggggaaatgtgcgcggaacccctatttgtttatttttctaaatacattcaaatatgtatccgctcatgagacaataaccctgataaatgcttcaataatattgaaaaaggaagagtatgagtattcaacatttccgtgtcgcccttattcccttttttgcggcattttgccttcctgtttttgctcacccagaaacgctggtgaaagtaaaagatgctgaagatcagttgggtgcacgagtgggttacatcgaactggatctcaacagcggtaagatccttgagagttttcgccccgaagaacgttttccaatgatgagcacttttaaagttctgctatgtggcgcggtattatcccgtattgacgccgggcaagagcaactcggtcgccgcatacactattctcagaatgacttggttgagtactcaccagtcacagaaaagcatcttacggatggcatgacagtaagagaattatgcagtgctgccataaccatgagtgataacactgcggccaacttacttctgacaacgatcggaggaccgaaggagctaaccgcttttttgcacaacatgggggatcatgtaactcgccttgatcgttgggaaccggagctgaatgaagccataccaaacgacgagcgtgacaccacgatgcctgtagcaatggcaacaacgttgcgcaaactattaactggcgaactacttactctagcttcccggcaacaattaatagactggatggaggcggataaagttgcaggaccacttctgcgctcggcccttccggctggctggtttattgctgataaatctggagccggtgagcgtgggtctcgcggtatcattgcagcactggggccagatggtaagccctcccgtatcgtagttatctacacgacggggagtcaggcaactatggatgaacgaaatagacagatcgctgagataggtgcctcactgattaagcattggtaactgtcagaccaagtttactcatatatactttagattgatttaaaacttcatttttaatttaaaaggatctaggtgaagatcctttttgataatctcatgaccaaaatcccttaacgtgagttttcgttccactgagcgtcagaccccgtagaaaagatcaaaggatcttcttgagatcctttttttctgcgcgtaatctgctgcttgcaaacaaaaaaaccaccgctaccagcggtggtttgtttgccggatcaagagctaccaactctttttccgaaggtaactggcttcagcagagcgcagataccaaatactgttcttctagtgtagccgtagttaggccaccacttcaagaactctgtagcaccgcctacatacctcgctctgctaatcctgttaccagtggctgctgccagtggcgataagtcgtgtcttaccgggttggactcaagacgatagttaccggataaggcgcagcggtcgggctgaacggggggttcgtgcacacagcccagcttggagcgaacgacctacaccgaactgagatacctacagcgtgagctatgagaaagcgccacgcttcccgaagggagaaaggcggacaggtatccggtaagcggcagggtcggaacaggagagcgcacgagggagcttccagggggaaacgcctggtatctttatagtcctgtcgggtttcgccacctctgacttgagcgtcgatttttgtgatgctcgtcaggggggcggagcctatggaaaaacgccagcaacgcggcctttttacggttcctggccttttgctggccttttgctcacatgttctttcctgcgttatcccctgattctgtggataaccgtattaccgcctttgagtgagctgataccgctcgccgcagccgaacgaccgagcgcagcgagtcagtgagcgaggaagcggaagagcgcccaatacgcaaaccgcctctccccgcgcgttggccgattcattaatgcagctggcacgacaggtttcccgactggaaagcgggcagtgagcgcaacgcaattaatgtgagttagctcactcattaggcaccccaggctttacactttatgcttccggctcgtatgttgtgtggaattgtgagcggataacaatttcacacaggaaacagctatgaccatgattacgccagatttaattaag

SEQ ID NO: 584 - DNA, 4883 bp, Artificial Sequence
  Description of Artificial Sequence: Synthetic polynucleotide
gccttaattaggctgcgcgctcgctcgctcactgaggccgcccgggcaaagcccgggcgtcgggcgacctttggtcgcccggcctcagtgagcgagcgagcgcgcagagagggagtggccaactccatcactaggggttccttgtagttaatgattaacccgccatgctacttatctaccagggtaatggggatcctctagaactatagctagtcgacattgattattgactagttattaatagtaatcaattacggggtcattagttcatagcccatatatggagttccgcgttacataacttacggtaaatggcccgcctggctgaccgcccaacgacccccgcccattgacgtcaataatgacgtatgttcccatagtaacgccaatagggactttccattgacgtcaatgggtggagtatttacggtaaactgcccacttggcagtacatcaagtgtatcatatgccaagtacgccccctattgacgtcaatgacggtaaatggcccgcctggcattatgcccagtacatgaccttatgggactttcctacttggcagtacatctacgtattagtcatcgctattaccatgtcgaggccacgttctgcttcactctccccatctcccccccctccccacccccaattttgtatttatttattttttaattattttgtgcagcgatgggggcggggggggggggcgcgcgccaggcggggcggggcggggcgaggggcggggcggggcgaggcggagaggtgcggcggcagccaatcagagcggcgcgctccgaaagtttccttttatggcgaggcggcggcggcggcggccctataaaaagcgaagcgcgcggcgggcgggagcaagcttgaactgaaaaaccagaaagttaactggtaagtttagtctttttgtcttttatttcaggtcccggatccggtggtggtgcaaatcaaagaactgctcctcagtggatgttgcctttacttctaggcctgtacggaagtgttacttctgctctaaaagctgcggaattgtacccgcggccgatccaccggtatgtggacgctggggcggcgcgcagtggctggcctgctggcctcaccgtcaccggcgcaggcacaaaccctgaccagagtaccaaggcccgctgagcttgcacccctttgtggacggcgcggcctgagaaccgacattgatgctacctgcaccccgcgcagggctagctctaaccagcgaggtctgaatcagatttggaacgtcaaaaaacagtctgtttacctgatgaacctgcgaaaaagcggcacccttggccatccaggcagtttggacgaaactacttatgagcgactggccgaagagaccctggactctctggccgagtttttcgaggatctcgccgataagccctatactttcgaggattacgacgtaagcttcggatcaggggtgctgactgtgaaattgggtggagatctcggtacctatgtcatcaataaacagacgcctaataaacagatttggctttctagcccttcctcaggccccaagcgctatgactggaccggaaaaaattgggtgtacagccacgacggtgttagccttcacgaactgctggcagccgagctgactaaagccttgaagactaaattggacttgtccagccttgcctacagtgggaaagacgcttgactcgaggacggggtgaactacgcctgaggatccgatctttttccctctgccaaaaattatggggacatcatgaagccccttgagcatctgacttctggctaataaaggaaatttattttcattgcaatagtgtgttggaattttttgtgtctctcactcggaagcaattcgttgatctgaatttcgaccacccataatacccattaccctggtagataagtagcatggcgggttaatcattaactacaaggaacccctagtgatggagttggccactccctctctgcgcgctcgctcgctcactgaggccgggcgaccaaaggtcgcccgacgcccgggctttgcccgggcggcctcagtgagcgagcgagcgcgcagccttaattaacctaattcactggccgtcgttttacaacgtcgtgactgggaaaaccctggcgttacccaacttaatcgccttgcagcacatccccctttcgccagctggcgtaatagcgaagaggcccgcaccgatcgcccttcccaacagttgcgcagcctgaatggcgaatgggacgcgccctgtagcggcgcattaagcgcggcgggtgtggtggttacgcgcagcgtgaccgctacacttgccagcgccctagcgcccgctcctttcgctttcttcccttcctttctcgccacgttcgccggctttccccgtcaagctctaaatcgggggctccctttagggttccgatttagtgctttacggcacctcgaccccaaaaaacttgattagggtgatggttcacgtagtgggccatcgccctgatagacggtttttcgccctttgacgttggagtccacgttctttaatagtggactcttgttccaaactggaacaacactcaaccctatctcggtctattcttttgatttataagggattttgccgatttcggcctattggttaaaaaatgagctgatttaacaaaaatttaacgcgaattttaacaaaatattaacgcttacaatttaggtggcacttttcggggaaatgtgcgcggaacccctatttgtttatttttctaaatacattcaaatatgtatccgctcatgagacaataaccctgataaatgcttcaataatattgaaaaaggaagagtatgagtattcaacatttccgtgtcgcccttattcccttttttgcggcattttgccttcctgtttttgctcacccagaaacgctggtgaaagtaaaagatgctgaagatcagttgggtgcacgagtgggttacatcgaactggatctcaacagcggtaagatccttgagagttttcgccccgaagaacgttttccaatgatgagcacttttaaagttctgctatgtggcgcggtattatcccgtattgacgccgggcaagagcaactcggtcgccgcatacactattctcagaatgacttggttgagtactcaccagtcacagaaaagcatcttacggatggcatgacagtaagagaattatgcagtgctgccataaccatgagtgataacactgcggccaacttacttctgacaacgatcggaggaccgaaggagctaaccgcttttttgcacaacatgggggatcatgtaactcgccttgatcgttgggaaccggagctgaatgaagccataccaaacgacgagcgtgacaccacgatgcctgtagcaatggcaacaacgttgcgcaaactattaactggcgaactacttactctagcttcccggcaacaattaatagactggatggaggcggataaagttgcaggaccacttctgcgctcggcccttccggctggctggtttattgctgataaatctggagccggtgagcgtgggtctcgcggtatcattgcagcactggggccagatggtaagccctcccgtatcgtagttatctacacgacggggagtcaggcaactatggatgaacgaaatagacagatcgctgagataggtgcctcactgattaagcattggtaactgtcagaccaagtttactcatatatactttagattgatttaaaacttcatttttaatttaaaaggatctaggtgaagatcctttttgataatctcatgaccaaaatcccttaacgtgagttttcgttccactgagcgtcagaccccgtagaaaagatcaaaggatcttcttgagatcctttttttctgcgcgtaatctgctgcttgcaaacaaaaaaaccaccgctaccagcggtggtttgtttgccggatcaagagctaccaactctttttccgaaggtaactggcttcagcagagcgcagataccaaatactgttcttctagtgtagccgtagttaggccaccacttcaagaactctgtagcaccgcctacatacctcgctctgctaatcctgttaccagtggctgctgccagtggcgataagtcgtgtcttaccgggttggactcaagacgatagttaccggataaggcgcagcggtcgggctgaacggggggttcgtgcacacagcccagcttggagcgaacgacctacaccgaactgagatacctacagcgtgagctatgagaaagcgccacgcttcccgaagggagaaaggcggacaggtatccggtaagcggcagggtcggaacaggagagcgcacgagggagcttccagggggaaacgcctggtatctttatagtcctgtcgggtttcgccacctctgacttgagcgtcgatttttgtgatgctcgtcaggggggcggagcctatggaaaaacgccagcaacgcggcctttttacggttcctggccttttgctggccttttgctcacatgttctttcctgcgttatcccctgattctgtggataaccgtattaccgcctttgagtgagctgataccgctcgccgcagccgaacgaccgagcgcagcgagtcagtgagcgaggaagcggaagagcgcccaatacgcaaaccgcctctccccgcgcgttggccgattcattaatgcagctggcacgacaggtttcccgactggaaagcgggcagtgagcgcaacgcaattaatgtgagttagctcactcattaggcaccccaggctttacactttatgcttccggctcgtatgttgtgtggaattgtgagcggataacaatttcacacaggaaacagctatgaccatgattacgccagatttaattaag

SEQ ID NO: 585 - DNA, 4883 bp, Artificial Sequence
  Description of Artificial Sequence: Synthetic polynucleotide
gccttaattaggctgcgcgctcgctcgctcactgaggccgcccgggcaaagcccgggcgtcgggcgacctttggtcgcccggcctcagtgagcgagcgagcgcgcagagagggagtggccaactccatcactaggggttccttgtagttaatgattaacccgccatgctacttatctaccagggtaatggggatcctctagaactatagctagtcgacattgattattgactagttattaatagtaatcaattacggggtcattagttcatagcccatatatggagttccgcgttacataacttacggtaaatggcccgcctggctgaccgcccaacgacccccgcccattgacgtcaataatgacgtatgttcccatagtaacgccaatagggactttccattgacgtcaatgggtggagtatttacggtaaactgcccacttggcagtacatcaagtgtatcatatgccaagtacgccccctattgacgtcaatgacggtaaatggcccgcctggcattatgcccagtacatgaccttatgggactttcctacttggcagtacatctacgtattagtcatcgctattaccatgtcgaggccacgttctgcttcactctccccatctcccccccctccccacccccaattttgtatttatttattttttaattattttgtgcagcgatgggggcggggggggggggcgcgcgccaggcggggcggggcggggcgaggggcggggcggggcgaggcggagaggtgcggcggcagccaatcagagcggcgcgctccgaaagtttccttttatggcgaggcggcggcggcggcggccctataaaaagcgaagcgcgcggcgggcgggagcaagcttgaactgaaaaaccagaaagttaactggtaagtttagtctttttgtcttttatttcaggtcccggatccggtggtggtgcaaatcaaagaactgctcctcagtggatgttgcctttacttctaggcctgtacggaagtgttacttctgctctaaaagctgcggaattgtacccgcggccgatccaccggtatgtggactctggggaggcgcgccgttgccggactcctggcatctccaagcccagcgcaggctcaaaccctcacgcgcgttcccaggccagccgagttggcccccctttgtggcaggcgcggcctgaggacagatatcgacgccacatgcactcctcgccgcgcctccagcaatcaaaggggtttgaaccaaatttggaacgtcaagaagcaatcagtgtatctcatgaatctgagaaagagcggcacactcggtcatcccggaagtctggacgaaaccacatacgaacggctcgccgaggaaacgctggatagcctggccgagtttttcgaggacctggctgataaaccgtatactttcgaagattatgacgtgtcattcgggagcggcgtactgaccgtcaaattgggcggtgacctggggacatacgtgattaacaagcagactcctaataaacagatttggttgagctctccttccagcgggcctaaacgctatgattggacagggaagaattgggtttacagtcacgacggagttagccttcacgagctcttggcagcggagctgacaaaggcgctcaagaccaaactcgacctgtcttcactcgcctattcaggcaaagacgcctgactcgaggacggggtgaactacgcctgaggatccgatctttttccctctgccaaaaattatggggacatcatgaagccccttgagcatctgacttctggctaataaaggaaatttattttcattgcaatagtgtgttggaattttttgtgtctctcactcggaagcaattcgttgatctgaatttcgaccacccataatacccattaccctggtagataagtagcatggcgggttaatcattaactacaaggaacccctagtgatggagttggccactccctctctgcgcgctcgctcgctcactgaggccgggcgaccaaaggtcgcccgacgcccgggctttgcccgggcggcctcagtgagcgagcgagcgcgcagccttaattaacctaattcactggccgtcgttttacaacgtcgtgactgggaaaaccctggcgttacccaacttaatcgccttgcagcacatccccctttcgccagctggcgtaatagcgaagaggcccgcaccgatcgcccttcccaacagttgcgcagcctgaatggcgaatgggacgcgccctgtagcggcgcattaagcgcggcgggtgtggtggttacgcgcagcgtgaccgctacacttgccagcgccctagcgcccgctcctttcgctttcttcccttcctttctcgccacgttcgccggctttccccgtcaagctctaaatcgggggctccctttagggttccgatttagtgctttacggcacctcgaccccaaaaaacttgattagggtgatggttcacgtagtgggccatcgccctgatagacggtttttcgccctttgacgttggagtccacgttctttaatagtggactcttgttccaaactggaacaacactcaaccctatctcggtctattcttttgatttataagggattttgccgatttcggcctattggttaaaaaatgagctgatttaacaaaaatttaacgcgaattttaacaaaatattaacgcttacaatttaggtggcacttttcggggaaatgtgcgcggaacccctatttgtttatttttctaaatacattcaaatatgtatccgctcatgagacaataaccctgataaatgcttcaataatattgaaaaaggaagagtatgagtattcaacatttccgtgtcgcccttattcccttttttgcggcattttgccttcctgtttttgctcacccagaaacgctggtgaaagtaaaagatgctgaagatcagttgggtgcacgagtgggttacatcgaactggatctcaacagcggtaagatccttgagagttttcgccccgaagaacgttttccaatgatgagcacttttaaagttctgctatgtggcgcggtattatcccgtattgacgccgggcaagagcaactcggtcgccgcatacactattctcagaatgacttggttgagtactcaccagtcacagaaaagcatcttacggatggcatgacagtaagagaattatgcagtgctgccataaccatgagtgataacactgcggccaacttacttctgacaacgatcggaggaccgaaggagctaaccgcttttttgcacaacatgggggatcatgtaactcgccttgatcgttgggaaccggagctgaatgaagccataccaaacgacgagcgtgacaccacgatgcctgtagcaatggcaacaacgttgcgcaaactattaactggcgaactacttactctagcttcccggcaacaattaatagactggatggaggcggataaagttgcaggaccacttctgcgctcggcccttccggctggctggtttattgctgataaatctggagccggtgagcgtgggtctcgcggtatcattgcagcactggggccagatggtaagccctcccgtatcgtagttatctacacgacggggagtcaggcaactatggatgaacgaaatagacagatcgctgagataggtgcctcactgattaagcattggtaactgtcagaccaagtttactcatatatactttagattgatttaaaacttcatttttaatttaaaaggatctaggtgaagatcctttttgataatctcatgaccaaaatcccttaacgtgagttttcgttccactgagcgtcagaccccgtagaaaagatcaaaggatcttcttgagatcctttttttctgcgcgtaatctgctgcttgcaaacaaaaaaaccaccgctaccagcggtggtttgtttgccggatcaagagctaccaactctttttccgaaggtaactggcttcagcagagcgcagataccaaatactgttcttctagtgtagccgtagttaggccaccacttcaagaactctgtagcaccgcctacatacctcgctctgctaatcctgttaccagtggctgctgccagtggcgataagtcgtgtcttaccgggttggactcaagacgatagttaccggataaggcgcagcggtcgggctgaacggggggttcgtgcacacagcccagcttggagcgaacgacctacaccgaactgagatacctacagcgtgagctatgagaaagcgccacgcttcccgaagggagaaaggcggacaggtatccggtaagcggcagggtcggaacaggagagcgcacgagggagcttccagggggaaacgcctggtatctttatagtcctgtcgggtttcgccacctctgacttgagcgtcgatttttgtgatgctcgtcaggggggcggagcctatggaaaaacgccagcaacgcggcctttttacggttcctggccttttgctggccttttgctcacatgttctttcctgcgttatcccctgattctgtggataaccgtattaccgcctttgagtgagctgataccgctcgccgcagccgaacgaccgagcgcagcgagtcagtgagcgaggaagcggaagagcgcccaatacgcaaaccgcctctccccgcgcgttggccgattcattaatgcagctggcacgacaggtttcccgactggaaagcgggcagtgagcgcaacgcaattaatgtgagttagctcactcattaggcaccccaggctttacactttatgcttccggctcgtatgttgtgtggaattgtgagcggataacaatttcacacaggaaacagctatgaccatgattacgccagatttaattaag

SEQ ID NO: 586 - DNA, 4883 bp, Artificial Sequence
  Description of Artificial Sequence: Synthetic polynucleotide
gccttaattaggctgcgcgctcgctcgctcactgaggccgcccgggcaaagcccgggcgtcgggcgacctttggtcgcccggcctcagtgagcgagcgagcgcgcagagagggagtggccaactccatcactaggggttccttgtagttaatgattaacccgccatgctacttatctaccagggtaatggggatcctctagaactatagctagtcgacattgattattgactagttattaatagtaatcaattacggggtcattagttcatagcccatatatggagttccgcgttacataacttacggtaaatggcccgcctggctgaccgcccaacgacccccgcccattgacgtcaataatgacgtatgttcccatagtaacgccaatagggactttccattgacgtcaatgggtggagtatttacggtaaactgcccacttggcagtacatcaagtgtatcatatgccaagtacgccccctattgacgtcaatgacggtaaatggcccgcctggcattatgcccagtacatgaccttatgggactttcctacttggcagtacatctacgtattagtcatcgctattaccatgtcgaggccacgttctgcttcactctccccatctcccccccctccccacccccaattttgtatttatttattttttaattattttgtgcagcgatgggggcggggggggggggcgcgcgccaggcggggcggggcggggcgaggggcggggcggggcgaggcggagaggtgcggcggcagccaatcagagcggcgcgctccgaaagtttccttttatggcgaggcggcggcggcggcggccctataaaaagcgaagcgcgcggcgggcgggagcaagcttgaactgaaaaaccagaaagttaactggtaagtttagtctttttgtcttttatttcaggtcccggatccggtggtggtgcaaatcaaagaactgctcctcagtggatgttgcctttacttctaggcctgtacggaagtgttacttctgctctaaaagctgcggaattgtacccgcggccgatccaccggtatgtggacactgggccggcgggcggtcgccggcttgctcgcttccccctcccccgcccaggcacagacccttacccgcgtcccacgccctgccgaactggcccctctttgcggccgcagagggctgagaacggatattgacgccacatgtacacctcggagggcttccagtaaccagcgggggcttaaccagatctggaacgtgaaaaaacagagcgtgtatctcatgaatctcaggaaatccgggactcttggccaccctggctctctggacgaaacaacttacgaacggctggcggaagaaactttggattccttggccgagttctttgaagacctcgctgacaagccctatacctttgaggattatgacgtgagcttcggcagcggggtcctgaccgtaaagctggggggcgacctgggcacttatgtaattaacaagcagacccccaacaaacagatctggctcagtagtcccagttccggccctaaacgctacgattggaccgggaaaaattgggtttactcccacgacggcgtctccttgcacgagctcctggcagctgagctgaccaaagccctgaagaccaaactcgatttgagttctcttgcctattctggcaaagacgcataactcgaggacggggtgaactacgcctgaggatccgatctttttccctctgccaaaaattatggggacatcatgaagccccttgagcatctgacttctggctaataaaggaaatttattttcattgcaatagtgtgttggaattttttgtgtctctcactcggaagcaattcgttgatctgaatttcgaccacccataatacccattaccctggtagataagtagcatggcgggttaatcattaactacaaggaacccctagtgatggagttggccactccctctctgcgcgctcgctcgctcactgaggccgggcgaccaaaggtcgcccgacgcccgggctttgcccgggcggcctcagtgagcgagcgagcgcgcagccttaattaacctaattcactggccgtcgttttacaacgtcgtgactgggaaaaccctggcgttacccaacttaatcgccttgcagcacatccccctttcgccagctggcgtaatagcgaagaggcccgcaccgatcgcccttcccaacagttgcgcagcctgaatggcgaatgggacgcgccctgtagcggcgcattaagcgcggcgggtgtggtggttacgcgcagcgtgaccgctacacttgccagcgccctagcgcccgctcctttcgctttcttcccttcctttctcgccacgttcgccggctttccccgtcaagctctaaatcgggggctccctttagggttccgatttagtgctttacggcacctcgaccccaaaaaacttgattagggtgatggttcacgtagtgggccatcgccctgatagacggtttttcgccctttgacgttggagtccacgttctttaatagtggactcttgttccaaactggaacaacactcaaccctatctcggtctattcttttgatttataagggattttgccgatttcggcctattggttaaaaaatgagctgatttaacaaaaatttaacgcgaattttaacaaaatattaacgcttacaatttaggtggcacttttcggggaaatgtgcgcggaacccctatttgtttatttttctaaatacattcaaatatgtatccgctcatgagacaataaccctgataaatgcttcaataatattgaaaaaggaagagtatgagtattcaacatttccgtgtcgcccttattcccttttttgcggcattttgccttcctgtttttgctcacccagaaacgctggtgaaagtaaaagatgctgaagatcagttgggtgcacgagtgggttacatcgaactggatctcaacagcggtaagatccttgagagttttcgccccgaagaacgttttccaatgatgagcacttttaaagttctgctatgtggcgcggtattatcccgtattgacgccgggcaagagcaactcggtcgccgcatacactattctcagaatgacttggttgagtactcaccagtcacagaaaagcatcttacggatggcatgacagtaagagaattatgcagtgctgccataaccatgagtgataacactgcggccaacttacttctgacaacgatcggaggaccgaaggagctaaccgcttttttgcacaacatgggggatcatgtaactcgccttgatcgttgggaaccggagctgaatgaagccataccaaacgacgagcgtgacaccacgatgcctgtagcaatggcaacaacgttgcgcaaactattaactggcgaactacttactctagcttcccggcaacaattaatagactggatggaggcggataaagttgcaggaccacttctgcgctcggcccttccggctggctggtttattgctgataaatctggagccggtgagcgtgggtctcgcggtatcattgcagcactggggccagatggtaagccctcccgtatcgtagttatctacacgacggggagtcaggcaactatggatgaacgaaatagacagatcgctgagataggtgcctcactgattaagcattggtaactgtcagaccaagtttactcatatatactttagattgatttaaaacttcatttttaatttaaaaggatctaggtgaagatcctttttgataatctcatgaccaaaatcccttaacgtgagttttcgttccactgagcgtcagaccccgtagaaaagatcaaaggatcttcttgagatcctttttttctgcgcgtaatctgctgcttgcaaacaaaaaaaccaccgctaccagcggtggtttgtttgccggatcaagagctaccaactctttttccgaaggtaactggcttcagcagagcgcagataccaaatactgttcttctagtgtagccgtagttaggccaccacttcaagaactctgtagcaccgcctacatacctcgctctgctaatcctgttaccagtggctgctgccagtggcgataagtcgtgtcttaccgggttggactcaagacgatagttaccggataaggcgcagcggtcgggctgaacggggggttcgtgcacacagcccagcttggagcgaacgacctacaccgaactgagatacctacagcgtgagctatgagaaagcgccacgcttcccgaagggagaaaggcggacaggtatccggtaagcggcagggtcggaacaggagagcgcacgagggagcttccagggggaaacgcctggtatctttatagtcctgtcgggtttcgccacctctgacttgagcgtcgatttttgtgatgctcgtcaggggggcggagcctatggaaaaacgccagcaacgcggcctttttacggttcctggccttttgctggccttttgctcacatgttctttcctgcgttatcccctgattctgtggataaccgtattaccgcctttgagtgagctgataccgctcgccgcagccgaacgaccgagcgcagcgagtcagtgagcgaggaagcggaagagcgcccaatacgcaaaccgcctctccccgcgcgttggccgattcattaatgcagctggcacgacaggtttcccgactggaaagcgggcagtgagcgcaacgcaattaatgtgagttagctcactcattaggcaccccaggctttacactttatgcttccggctcgtatgttgtgtggaattgtgagcggataacaatttcacacaggaaacagctatgaccatgattacgccagatttaattaag

SEQ ID NO: 587 - DNA, 4883 bp, Artificial Sequence
  Description of Artificial Sequence: Synthetic polynucleotide
gccttaattaggctgcgcgctcgctcgctcactgaggccgcccgggcaaagcccgggcgtcgggcgacctttggtcgcccggcctcagtgagcgagcgagcgcgcagagagggagtggccaactccatcactaggggttccttgtagttaatgattaacccgccatgctacttatctaccagggtaatggggatcctctagaactatagctagtcgacattgattattgactagttattaatagtaatcaattacggggtcattagttcatagcccatatatggagttccgcgttacataacttacggtaaatggcccgcctggctgaccgcccaacgacccccgcccattgacgtcaataatgacgtatgttcccatagtaacgccaatagggactttccattgacgtcaatgggtggagtatttacggtaaactgcccacttggcagtacatcaagtgtatcatatgccaagtacgccccctattgacgtcaatgacggtaaatggcccgcctggcattatgcccagtacatgaccttatgggactttcctacttggcagtacatctacgtattagtcatcgctattaccatgtcgaggccacgttctgcttcactctccccatctcccccccctccccacccccaattttgtatttatttattttttaattattttgtgcagcgatgggggcggggggggggggcgcgcgccaggcggggcggggcggggcgaggggcggggcggggcgaggcggagaggtgcggcggcagccaatcagagcggcgcgctccgaaagtttccttttatggcgaggcggcggcggcggcggccctataaaaagcgaagcgcgcggcgggcgggagcaagcttgaactgaaaaaccagaaagttaactggtaagtttagtctttttgtcttttatttcaggtcccggatccggtggtggtgcaaatcaaagaactgctcctcagtggatgttgcctttacttctaggcctgtacggaagtgttacttctgctctaaaagctgcggaattgtacccgcggccgatccaccggtatgtggacactcggacgccgagccgtggcgggcttgcttgccagtcctagtcctgcacaggctcaaaccctgactcgcgtcccgcgaccagccgaactggccccgctgtgcgggcggagagggctcaggacagatattgatgctacctgtaccccgagaagggccagctcaaatcagagaggtctgaatcagatctggaacgtaaagaagcaatctgtgtatctgatgaacctccgcaagtcagggaccctgggtcaccctggcagcctcgatgagaccacatacgagcgcctggccgaagagacgttggactctttggcagagttcttcgaagacctcgctgataagccttacacatttgaggattacgacgtgtcttttggatctggggtgctcacagtgaagctggggggtgatctgggcacttacgtgattaacaagcagacccccaataaacaaatctggctcagttctccctcctccgggcctaagcggtatgactggactgggaagaactgggtttacagccacgatggtgtctctttgcacgaactcctggccgcggagctcactaaggcacttaagaccaagttggacctttcttccttggcatattccggcaaagacgcataactcgaggacggggtgaactacgcctgaggatccgatctttttccctctgccaaaaattatggggacatcatgaagccccttgagcatctgacttctggctaataaaggaaatttattttcattgcaatagtgtgttggaattttttgtgtctctcactcggaagcaattcgttgatctgaatttcgaccacccataatacccattaccctggtagataagtagcatggcgggttaatcattaactacaaggaacccctagtgatggagttggccactccctctctgcgcgctcgctcgctcactgaggccgggcgaccaaaggtcgcccgacgcccgggctttgcccgggcggcctcagtgagcgagcgagcgcgcagccttaattaacctaattcactggccgtcgttttacaacgtcgtgactgggaaaaccctggcgttacccaacttaatcgccttgcagcacatccccctttcgccagctggcgtaatagcgaagaggcccgcaccgatcgcccttcccaacagttgcgcagcctgaatggcgaatgggacgcgccctgtagcggcgcattaagcgcggcgggtgtggtggttacgcgcagcgtgaccgctacacttgccagcgccctagcgcccgctcctttcgctttcttcccttcctttctcgccacgttcgccggctttccccgtcaagctctaaatcgggggctccctttagggttccgatttagtgctttacggcacctcgaccccaaaaaacttgattagggtgatggttcacgtagtgggccatcgccctgatagacggtttttcgccctttgacgttggagtccacgttctttaatagtggactcttgttccaaactggaacaacactcaaccctatctcggtctattcttttgatttataagggattttgccgatttcggcctattggttaaaaaatgagctgatttaacaaaaatttaacgcgaattttaacaaaatattaacgcttacaatttaggtggcacttttcggggaaatgtgcgcggaacccctatttgtttatttttctaaatacattcaaatatgtatccgctcatgagacaataaccctgataaatgcttcaataatattgaaaaaggaagagtatgagtattcaacatttccgtgtcgcccttattcccttttttgcggcattttgccttcctgtttttgctcacccagaaacgctggtgaaagtaaaagatgctgaagatcagttgggtgcacgagtgggttacatcgaactggatctcaacagcggtaagatccttgagagttttcgccccgaagaacgttttccaatgatgagcacttttaaagttctgctatgtggcgcggtattatcccgtattgacgccgggcaagagcaactcggtcgccgcatacactattctcagaatgacttggttgagtactcaccagtcacagaaaagcatcttacggatggcatgacagtaagagaattatgcagtgctgccataaccatgagtgataacactgcggccaacttacttctgacaacgatcggaggaccgaaggagctaaccgcttttttgcacaacatgggggatcatgtaactcgccttgatcgttgggaaccggagctgaatgaagccataccaaacgacgagcgtgacaccacgatgcctgtagcaatggcaacaacgttgcgcaaactattaactggcgaactacttactctagcttcccggcaacaattaatagactggatggaggcggataaagttgcaggaccacttctgcgctcggcccttccggctggctggtttattgctgataaatctggagccggtgagcgtgggtctcgcggtatcattgcagcactggggccagatggtaagccctcccgtatcgtagttatctacacgacggggagtcaggcaactatggatgaacgaaatagacagatcgctgagataggtgcctcactgattaagcattggtaactgtcagaccaagtttactcatatatactttagattgatttaaaacttcatttttaatttaaaaggatctaggtgaagatcctttttgataatctcatgaccaaaatcccttaacgtgagttttcgttccactgagcgtcagaccccgtagaaaagatcaaaggatcttcttgagatcctttttttctgcgcgtaatctgctgcttgcaaacaaaaaaaccaccgctaccagcggtggtttgtttgccggatcaagagctaccaactctttttccgaaggtaactggcttcagcagagcgcagataccaaatactgttcttctagtgtagccgtagttaggccaccacttcaagaactctgtagcaccgcctacatacctcgctctgctaatcctgttaccagtggctgctgccagtggcgataagtcgtgtcttaccgggttggactcaagacgatagttaccggataaggcgcagcggtcgggctgaacggggggttcgtgcacacagcccagcttggagcgaacgacctacaccgaactgagatacctacagcgtgagctatgagaaagcgccacgcttcccgaagggagaaaggcggacaggtatccggtaagcggcagggtcggaacaggagagcgcacgagggagcttccagggggaaacgcctggtatctttatagtcctgtcgggtttcgccacctctgacttgagcgtcgatttttgtgatgctcgtcaggggggcggagcctatggaaaaacgccagcaacgcggcctttttacggttcctggccttttgctggccttttgctcacatgttctttcctgcgttatcccctgattctgtggataaccgtattaccgcctttgagtgagctgataccgctcgccgcagccgaacgaccgagcgcagcgagtcagtgagcgaggaagcggaagagcgcccaatacgcaaaccgcctctccccgcgcgttggccgattcattaatgcagctggcacgacaggtttcccgactggaaagcgggcagtgagcgcaacgcaattaatgtgagttagctcactcattaggcaccccaggctttacactttatgcttccggctcgtatgttgtgtggaattgtgagcggataacaatttcacacaggaaacagctatgaccatgattacgccagatttaattaag

SEQ ID NO: 588 - DNA, 4883 bp, Artificial Sequence
  Description of Artificial Sequence: Synthetic polynucleotide
gccttaattaggctgcgcgctcgctcgctcactgaggccgcccgggcaaagcccgggcgtcgggcgacctttggtcgcccggcctcagtgagcgagcgagcgcgcagagagggagtggccaactccatcactaggggttccttgtagttaatgattaacccgccatgctacttatctaccagggtaatggggatcctctagaactatagctagtcgacattgattattgactagttattaatagtaatcaattacggggtcattagttcatagcccatatatggagttccgcgttacataacttacggtaaatggcccgcctggctgaccgcccaacgacccccgcccattgacgtcaataatgacgtatgttcccatagtaacgccaatagggactttccattgacgtcaatgggtggagtatttacggtaaactgcccacttggcagtacatcaagtgtatcatatgccaagtacgccccctattgacgtcaatgacggtaaatggcccgcctggcattatgcccagtacatgaccttatgggactttcctacttggcagtacatctacgtattagtcatcgctattaccatgtcgaggccacgttctgcttcactctccccatctcccccccctccccacccccaattttgtatttatttattttttaattattttgtgcagcgatgggggcggggggggggggcgcgcgccaggcggggcggggcggggcgaggggcggggcggggcgaggcggagaggtgcggcggcagccaatcagagcggcgcgctccgaaagtttccttttatggcgaggcggcggcggcggcggccctataaaaagcgaagcgcgcggcgggcgggagcaagcttgaactgaaaaaccagaaagttaactggtaagtttagtctttttgtcttttatttcaggtcccggatccggtggtggtgcaaatcaaagaactgctcctcagtggatgttgcctttacttctaggcctgtacggaagtgttacttctgctctaaaagctgcggaattgtacccgcggccgatccaccggtatgtggacgcttggaaggcgggccgtggccggcctgcttgcatcaccgtctcctgctcaagctcagactttgactcgcgtgccaagaccagctgagctcgctccactttgcgggcgacgaggcctgaggactgatattgatgctacctgcaccccaaggcgcgcctcctcaaaccagagaggcctgaaccagatttggaatgttaagaagcagtctgtttacctcatgaacctccggaagtcagggacactgggacacccagggtcacttgacgagacaacctatgagagactggccgaagagaccctcgattcccttgcagaattcttcgaggatcttgctgataagccctatacctttgaagactatgacgtttcctttgggagtggtgtgctcaccgtcaaactggggggcgatctgggaacatacgtaatcaacaaacagactccaaataaacaaatttggctgtcaagccccagttctgggcctaagcggtatgactggactggtaagaactgggtttacagtcatgacggtgtgagcctgcacgaacttctggccgccgagcttacaaaggccctgaagacaaagctggatctgagcagtttggcctattctggcaaggacgcgtgactcgaggacggggtgaactacgcctgaggatccgatctttttccctctgccaaaaattatggggacatcatgaagccccttgagcatctgacttctggctaataaaggaaatttattttcattgcaatagtgtgttggaattttttgtgtctctcactcggaagcaattcgttgatctgaatttcgaccacccataatacccattaccctggtagataagtagcatggcgggttaatcattaactacaaggaacccctagtgatggagttggccactccctctctgcgcgctcgctcgctcactgaggccgggcgaccaaaggtcgcccgacgcccgggctttgcccgggcggcctcagtgagcgagcgagcgcgcagccttaattaacctaattcactggccgtcgttttacaacgtcgtgactgggaaaaccctggcgttacccaacttaatcgccttgcagcacatccccctttcgccagctggcgtaatagcgaagaggcccgcaccgatcgcccttcccaacagttgcgcagcctgaatggcgaatgggacgcgccctgtagcggcgcattaagcgcggcgggtgtggtggttacgcgcagcgtgaccgctacacttgccagcgccctagcgcccgctcctttcgctttcttcccttcctttctcgccacgttcgccggctttccccgtcaagctctaaatcgggggctccctttagggttccgatttagtgctttacggcacctcgaccccaaaaaacttgattagggtgatggttcacgtagtgggccatcgccctgatagacggtttttcgccctttgacgttggagtccacgttctttaatagtggactcttgttccaaactggaacaacactcaaccctatctcggtctattcttttgatttataagggattttgccgatttcggcctattggttaaaaaatgagctgatttaacaaaaatttaacgcgaattttaacaaaatattaacgcttacaatttaggtggcacttttcggggaaatgtgcgcggaacccctatttgtttatttttctaaatacattcaaatatgtatccgctcatgagacaataaccctgataaatgcttcaataatattgaaaaaggaagagtatgagtattcaacatttccgtgtcgcccttattcccttttttgcggcattttgccttcctgtttttgctcacccagaaacgctggtgaaagtaaaagatgctgaagatcagttgggtgcacgagtgggttacatcgaactggatctcaacagcggtaagatccttgagagttttcgccccgaagaacgttttccaatgatgagcacttttaaagttctgctatgtggcgcggtattatcccgtattgacgccgggcaagagcaactcggtcgccgcatacactattctcagaatgacttggttgagtactcaccagtcacagaaaagcatcttacggatggcatgacagtaagagaattatgcagtgctgccataaccatgagtgataacactgcggccaacttacttctgacaacgatcggaggaccgaaggagctaaccgcttttttgcacaacatgggggatcatgtaactcgccttgatcgttgggaaccggagctgaatgaagccataccaaacgacgagcgtgacaccacgatgcctgtagcaatggcaacaacgttgcgcaaactattaactggcgaactacttactctagcttcccggcaacaattaatagactggatggaggcggataaagttgcaggaccacttctgcgctcggcccttccggctggctggtttattgctgataaatctggagccggtgagcgtgggtctcgcggtatcattgcagcactggggccagatggtaagccctcccgtatcgtagttatctacacgacggggagtcaggcaactatggatgaacgaaatagacagatcgctgagataggtgcctcactgattaagcattggtaactgtcagaccaagtttactcatatatactttagattgatttaaaacttcatttttaatttaaaaggatctaggtgaagatcctttttgataatctcatgaccaaaatcccttaacgtgagttttcgttccactgagcgtcagaccccgtagaaaagatcaaaggatcttcttgagatcctttttttctgcgcgtaatctgctgcttgcaaacaaaaaaaccaccgctaccagcggtggtttgtttgccggatcaagagctaccaactctttttccgaaggtaactggcttcagcagagcgcagataccaaatactgttcttctagtgtagccgtagttaggccaccacttcaagaactctgtagcaccgcctacatacctcgctctgctaatcctgttaccagtggctgctgccagtggcgataagtcgtgtcttaccgggttggactcaagacgatagttaccggataaggcgcagcggtcgggctgaacggggggttcgtgcacacagcccagcttggagcgaacgacctacaccgaactgagatacctacagcgtgagctatgagaaagcgccacgcttcccgaagggagaaaggcggacaggtatccggtaagcggcagggtcggaacaggagagcgcacgagggagcttccagggggaaacgcctggtatctttatagtcctgtcgggtttcgccacctctgacttgagcgtcgatttttgtgatgctcgtcaggggggcggagcctatggaaaaacgccagcaacgcggcctttttacggttcctggccttttgctggccttttgctcacatgttctttcctgcgttatcccctgattctgtggataaccgtattaccgcctttgagtgagctgataccgctcgccgcagccgaacgaccgagcgcagcgagtcagtgagcgaggaagcggaagagcgcccaatacgcaaaccgcctctccccgcgcgttggccgattcattaatgcagctggcacgacaggtttcccgactggaaagcgggcagtgagcgcaacgcaattaatgtgagttagctcactcattaggcaccccaggctttacactttatgcttccggctcgtatgttgtgtggaattgtgagcggataacaatttcacacaggaaacagctatgaccatgattacgccagatttaattaag

SEQ ID NO: 589 - DNA, 4883 bp, Artificial Sequence
  Description of Artificial Sequence: Synthetic polynucleotide
gccttaattaggctgcgcgctcgctcgctcactgaggccgcccgggcaaagcccgggcgtcgggcgacctttggtcgcccggcctcagtgagcgagcgagcgcgcagagagggagtggccaactccatcactaggggttccttgtagttaatgattaacccgccatgctacttatctaccagggtaatggggatcctctagaactatagctagtcgacattgattattgactagttattaatagtaatcaattacggggtcattagttcatagcccatatatggagttccgcgttacataacttacggtaaatggcccgcctggctgaccgcccaacgacccccgcccattgacgtcaataatgacgtatgttcccatagtaacgccaatagggactttccattgacgtcaatgggtggagtatttacggtaaactgcccacttggcagtacatcaagtgtatcatatgccaagtacgccccctattgacgtcaatgacggtaaatggcccgcctggcattatgcccagtacatgaccttatgggactttcctacttggcagtacatctacgtattagtcatcgctattaccatgtcgaggccacgttctgcttcactctccccatctcccccccctccccacccccaattttgtatttatttattttttaattattttgtgcagcgatgggggcggggggggggggcgcgcgccaggcggggcggggcggggcgaggggcggggcggggcgaggcggagaggtgcggcggcagccaatcagagcggcgcgctccgaaagtttccttttatggcgaggcggcggcggcggcggccctataaaaagcgaagcgcgcggcgggcgggagcaagcttgaactgaaaaaccagaaagttaactggtaagtttagtctttttgtcttttatttcaggtcccggatccggtggtggtgcaaatcaaagaactgctcctcagtggatgttgcctttacttctaggcctgtacggaagtgttacttctgctctaaaagctgcggaattgtacccgcggccgatccaccggtatgtggacactcgggcgacgcgccgtggctgggctgcttgcttccccaagtcccgcacaggcgcaaaccctcacaagggtcccacggccagctgaattggccccgctgtgcggtcggaggggcctgcgaacagatatagacgcaacgtgcacccccagaagagcaagcagcaaccagagaggcctcaatcagatttggaacgtcaagaaacagagtgtctatctgatgaacctccgcaaatcagggacccttggtcatccgggatctcttgatgaaacgacctatgaacggctggctgaggagacgcttgactccctggcagagttcttcgaggatctggctgataagccatacacgttcgaggactatgatgtttcttttggttctggcgtcctgacggtgaaactcggaggggatctgggcacttacgttatcaacaaacagactcccaataaacagatttggttgtctagtcctagcagtggcccaaaacgctatgactggacgggcaagaactgggtgtactcccacgatggagttagcctgcacgaacttctggccgctgagcttactaaagcgctgaagactaagctggatctctccagcctcgcatacagcggcaaagacgcctagctcgaggacggggtgaactacgcctgaggatccgatctttttccctctgccaaaaattatggggacatcatgaagccccttgagcatctgacttctggctaataaaggaaatttattttcattgcaatagtgtgttggaattttttgtgtctctcactcggaagcaattcgttgatctgaatttcgaccacccataatacccattaccctggtagataagtagcatggcgggttaatcattaactacaaggaacccctagtgatggagttggccactccctctctgcgcgctcgctcgctcactgaggccgggcgaccaaaggtcgcccgacgcccgggctttgcccgggcggcctcagtgagcgagcgagcgcgcagccttaattaacctaattcactggccgtcgttttacaacgtcgtgactgggaaaaccctggcgttacccaacttaatcgccttgcagcacatccccctttcgccagctggcgtaatagcgaagaggcccgcaccgatcgcccttcccaacagttgcgcagcctgaatggcgaatgggacgcgccctgtagcggcgcattaagcgcggcgggtgtggtggttacgcgcagcgtgaccgctacacttgccagcgccctagcgcccgctcctttcgctttcttcccttcctttctcgccacgttcgccggctttccccgtcaagctctaaatcgggggctccctttagggttccgatttagtgctttacggcacctcgaccccaaaaaacttgattagggtgatggttcacgtagtgggccatcgccctgatagacggtttttcgccctttgacgttggagtccacgttctttaatagtggactcttgttccaaactggaacaacactcaaccctatctcggtctattcttttgatttataagggattttgccgatttcggcctattggttaaaaaatgagctgatttaacaaaaatttaacgcgaattttaacaaaatattaacgcttacaatttaggtggcacttttcggggaaatgtgcgcggaacccctatttgtttatttttctaaatacattcaaatatgtatccgctcatgagacaataaccctgataaatgcttcaataatattgaaaaaggaagagtatgagtattcaacatttccgtgtcgcccttattcccttttttgcggcattttgccttcctgtttttgctcacccagaaacgctggtgaaagtaaaagatgctgaagatcagttgggtgcacgagtgggttacatcgaactggatctcaacagcggtaagatccttgagagttttcgccccgaagaacgttttccaatgatgagcacttttaaagttctgctatgtggcgcggtattatcccgtattgacgccgggcaagagcaactcggtcgccgcatacactattctcagaatgacttggttgagtactcaccagtcacagaaaagcatcttacggatggcatgacagtaagagaattatgcagtgctgccataaccatgagtgataacactgcggccaacttacttctgacaacgatcggaggaccgaaggagctaaccgcttttttgcacaacatgggggatcatgtaactcgccttgatcgttgggaaccggagctgaatgaagccataccaaacgacgagcgtgacaccacgatgcctgtagcaatggcaacaacgttgcgcaaactattaactggcgaactacttactctagcttcccggcaacaattaatagactggatggaggcggataaagttgcaggaccacttctgcgctcggcccttccggctggctggtttattgctgataaatctggagccggtgagcgtgggtctcgcggtatcattgcagcactggggccagatggtaagccctcccgtatcgtagttatctacacgacggggagtcaggcaactatggatgaacgaaatagacagatcgctgagataggtgcctcactgattaagcattggtaactgtcagaccaagtttactcatatatactttagattgatttaaaacttcatttttaatttaaaaggatctaggtgaagatcctttttgataatctcatgaccaaaatcccttaacgtgagttttcgttccactgagcgtcagaccccgtagaaaagatcaaaggatcttcttgagatcctttttttctgcgcgtaatctgctgcttgcaaacaaaaaaaccaccgctaccagcggtggtttgtttgccggatcaagagctaccaactctttttccgaaggtaactggcttcagcagagcgcagataccaaatactgttcttctagtgtagccgtagttaggccaccacttcaagaactctgtagcaccgcctacatacctcgctctgctaatcctgttaccagtggctgctgccagtggcgataagtcgtgtcttaccgggttggactcaagacgatagttaccggataaggcgcagcggtcgggctgaacggggggttcgtgcacacagcccagcttggagcgaacgacctacaccgaactgagatacctacagcgtgagctatgagaaagcgccacgcttcccgaagggagaaaggcggacaggtatccggtaagcggcagggtcggaacaggagagcgcacgagggagcttccagggggaaacgcctggtatctttatagtcctgtcgggtttcgccacctctgacttgagcgtcgatttttgtgatgctcgtcaggggggcggagcctatggaaaaacgccagcaacgcggcctttttacggttcctggccttttgctggccttttgctcacatgttctttcctgcgttatcccctgattctgtggataaccgtattaccgcctttgagtgagctgataccgctcgccgcagccgaacgaccgagcgcagcgagtcagtgagcgaggaagcggaagagcgcccaatacgcaaaccgcctctccccgcgcgttggccgattcattaatgcagctggcacgacaggtttcccgactggaaagcgggcagtgagcgcaacgcaattaatgtgagttagctcactcattaggcaccccaggctttacactttatgcttccggctcgtatgttgtgtggaattgtgagcggataacaatttcacacaggaaacagctatgaccatgattacgccagatttaattaag

SEQ ID NO: 590 - DNA, 4883 bp, Artificial Sequence
  Description of Artificial Sequence: Synthetic polynucleotide
gccttaattaggctgcgcgctcgctcgctcactgaggccgcccgggcaaagcccgggcgtcgggcgacctttggtcgcccggcctcagtgagcgagcgagcgcgcagagagggagtggccaactccatcactaggggttccttgtagttaatgattaacccgccatgctacttatctaccagggtaatggggatcctctagaactatagctagtcgacattgattattgactagttattaatagtaatcaattacggggtcattagttcatagcccatatatggagttccgcgttacataacttacggtaaatggcccgcctggctgaccgcccaacgacccccgcccattgacgtcaataatgacgtatgttcccatagtaacgccaatagggactttccattgacgtcaatgggtggagtatttacggtaaactgcccacttggcagtacatcaagtgtatcatatgccaagtacgccccctattgacgtcaatgacggtaaatggcccgcctggcattatgcccagtacatgaccttatgggactttcctacttggcagtacatctacgtattagtcatcgctattaccatgtcgaggccacgttctgcttcactctccccatctcccccccctccccacccccaattttgtatttatttattttttaattattttgtgcagcgatgggggcggggggggggggcgcgcgccaggcggggcggggcggggcgaggggcggggcggggcgaggcggagaggtgcggcggcagccaatcagagcggcgcgctccgaaagtttccttttatggcgaggcggcggcggcggcggccctataaaaagcgaagcgcgcggcgggcgggagcaagcttgaactgaaaaaccagaaagttaactggtaagtttagtctttttgtcttttatttcaggtcccggatccggtggtggtgcaaatcaaagaactgctcctcagtggatgttgcctttacttctaggcctgtacggaagtgttacttctgctctaaaagctgcggaattgtacccgcggccgatccaccggtatgtggacactgggccggcgagcggtggccggactcctcgccagcccaagccctgctcaggctcagacactgactcgcgtgcctcgcccagccgagcttgcaccattgtgtggacgccggggactcagaactgacatagacgccacctgcactcctcgacgggcctcatctaaccagaggggcttgaatcaaatatggaatgtgaagaagcagtcagtctacctgatgaatttgcggaagagtgggaccttgggccacccaggttcccttgacgaaaccacctatgagcgacttgcggaagagaccctggacagtctggccgagttcttcgaggatttggcagataaaccatacacgttcgaagactacgacgtgagcttcggcagcggcgtactgacagttaaactcggcggtgacctggggacgtacgtgattaacaagcagacaccaaacaaacaaatttggttgtccagcccttcttccggaccaaaacggtacgattggacaggaaaaaattgggtttactcccatgacggcgtgagcctgcacgaactcctcgctgcggaactgacaaaggcacttaagaccaaactggacctctcaagcctggcctacagcggaaaagacgcatagctcgaggacggggtgaactacgcctgaggatccgatctttttccctctgccaaaaattatggggacatcatgaagccccttgagcatctgacttctggctaataaaggaaatttattttcattgcaatagtgtgttggaattttttgtgtctctcactcggaagcaattcgttgatctgaatttcgaccacccataatacccattaccctggtagataagtagcatggcgggttaatcattaactacaaggaacccctagtgatggagttggccactccctctctgcgcgctcgctcgctcactgaggccgggcgaccaaaggtcgcccgacgcccgggctttgcccgggcggcctcagtgagcgagcgagcgcgcagccttaattaacctaattcactggccgtcgttttacaacgtcgtgactgggaaaaccctggcgttacccaacttaatcgccttgcagcacatccccctttcgccagctggcgtaatagcgaagaggcccgcaccgatcgcccttcccaacagttgcgcagcctgaatggcgaatgggacgcgccctgtagcggcgcattaagcgcggcgggtgtggtggttacgcgcagcgtgaccgctacacttgccagcgccctagcgcccgctcctttcgctttcttcccttcctttctcgccacgttcgccggctttccccgtcaagctctaaatcgggggctccctttagggttccgatttagtgctttacggcacctcgaccccaaaaaacttgattagggtgatggttcacgtagtgggccatcgccctgatagacggtttttcgccctttgacgttggagtccacgttctttaatagtggactcttgttccaaactggaacaacactcaaccctatctcggtctattcttttgatttataagggattttgccgatttcggcctattggttaaaaaatgagctgatttaacaaaaatttaacgcgaattttaacaaaatattaacgcttacaatttaggtggcacttttcggggaaatgtgcgcggaacccctatttgtttatttttctaaatacattcaaatatgtatccgctcatgagacaataaccctgataaatgcttcaataatattgaaaaaggaagagtatgagtattcaacatttccgtgtcgcccttattcccttttttgcggcattttgccttcctgtttttgctcacccagaaacgctggtgaaagtaaaagatgctgaagatcagttgggtgcacgagtgggttacatcgaactggatctcaacagcggtaagatccttgagagttttcgccccgaagaacgttttccaatgatgagcacttttaaagttctgctatgtggcgcggtattatcccgtattgacgccgggcaagagcaactcggtcgccgcatacactattctcagaatgacttggttgagtactcaccagtcacagaaaagcatcttacggatggcatgacagtaagagaattatgcagtgctgccataaccatgagtgataacactgcggccaacttacttctgacaacgatcggaggaccgaaggagctaaccgcttttttgcacaacatgggggatcatgtaactcgccttgatcgttgggaaccggagctgaatgaagccataccaaacgacgagcgtgacaccacgatgcctgtagcaatggcaacaacgttgcgcaaactattaactggcgaactacttactctagcttcccggcaacaattaatagactggatggaggcggataaagttgcaggaccacttctgcgctcggcccttccggctggctggtttattgctgataaatctggagccggtgagcgtgggtctcgcggtatcattgcagcactggggccagatggtaagccctcccgtatcgtagttatctacacgacggggagtcaggcaactatggatgaacgaaatagacagatcgctgagataggtgcctcactgattaagcattggtaactgtcagaccaagtttactcatatatactttagattgatttaaaacttcatttttaatttaaaaggatctaggtgaagatcctttttgataatctcatgaccaaaatcccttaacgtgagttttcgttccactgagcgtcagaccccgtagaaaagatcaaaggatcttcttgagatcctttttttctgcgcgtaatctgctgcttgcaaacaaaaaaaccaccgctaccagcggtggtttgtttgccggatcaagagctaccaactctttttccgaaggtaactggcttcagcagagcgcagataccaaatactgttcttctagtgtagccgtagttaggccaccacttcaagaactctgtagcaccgcctacatacctcgctctgctaatcctgttaccagtggctgctgccagtggcgataagtcgtgtcttaccgggttggactcaagacgatagttaccggataaggcgcagcggtcgggctgaacggggggttcgtgcacacagcccagcttggagcgaacgacctacaccgaactgagatacctacagcgtgagctatgagaaagcgccacgcttcccgaagggagaaaggcggacaggtatccggtaagcggcagggtcggaacaggagagcgcacgagggagcttccagggggaaacgcctggtatctttatagtcctgtcgggtttcgccacctctgacttgagcgtcgatttttgtgatgctcgtcaggggggcggagcctatggaaaaacgccagcaacgcggcctttttacggttcctggccttttgctggccttttgctcacatgttctttcctgcgttatcccctgattctgtggataaccgtattaccgcctttgagtgagctgataccgctcgccgcagccgaacgaccgagcgcagcgagtcagtgagcgaggaagcggaagagcgcccaatacgcaaaccgcctctccccgcgcgttggccgattcattaatgcagctggcacgacaggtttcccgactggaaagcgggcagtgagcgcaacgcaattaatgtgagttagctcactcattaggcaccccaggctttacactttatgcttccggctcgtatgttgtgtggaattgtgagcggataacaatttcacacaggaaacagctatgaccatgattacgccagatttaattaag

SEQ ID NO: 591 - DNA, 4883 bp, Artificial Sequence
  Description of Artificial Sequence: Synthetic polynucleotide
gccttaattaggctgcgcgctcgctcgctcactgaggccgcccgggcaaagcccgggcgtcgggcgacctttggtcgcccggcctcagtgagcgagcgagcgcgcagagagggagtggccaactccatcactaggggttccttgtagttaatgattaacccgccatgctacttatctaccagggtaatggggatcctctagaactatagctagtcgacattgattattgactagttattaatagtaatcaattacggggtcattagttcatagcccatatatggagttccgcgttacataacttacggtaaatggcccgcctggctgaccgcccaacgacccccgcccattgacgtcaataatgacgtatgttcccatagtaacgccaatagggactttccattgacgtcaatgggtggagtatttacggtaaactgcccacttggcagtacatcaagtgtatcatatgccaagtacgccccctattgacgtcaatgacggtaaatggcccgcctggcattatgcccagtacatgaccttatgggactttcctacttggcagtacatctacgtattagtcatcgctattaccatgtcgaggccacgttctgcttcactctccccatctcccccccctccccacccccaattttgtatttatttattttttaattattttgtgcagcgatgggggcggggggggggggcgcgcgccaggcggggcggggcggggcgaggggcggggcggggcgaggcggagaggtgcggcggcagccaatcagagcggcgcgctccgaaagtttccttttatggcgaggcggcggcggcggcggccctataaaaagcgaagcgcgcggcgggcgggagcaagcttgaactgaaaaaccagaaagttaactggtaagtttagtctttttgtcttttatttcaggtcccggatccggtggtggtgcaaatcaaagaactgctcctcagtggatgttgcctttacttctaggcctgtacggaagtgttacttctgctctaaaagctgcggaattgtacccgcggccgatccaccggtatgtggactctgggtcgacgcgccgtagccggtctcttggcctccccatcccctgcgcaggcacagacccttacacgagttccacggcccgctgaactggcaccactctgcggacgccggggcctgagaaccgatattgacgctacgtgcactccccgacgagcctcttctaatcagagggggctcaaccagatctggaacgtgaagaagcagtcagtctacttgatgaatctgagaaagagcgggacccttgggcaccccgggtctctcgacgagactacatacgagaggctggccgaggagactttggactctctcgccgaattcttcgaggatttggcagacaagccgtacacctttgaagactacgatgtctcattcggatcaggggtgctgacggttaaactggggggcgatctcggaacctacgtcataaacaaacagacacccaataagcagatctggttgtctagcccatcatccggtcctaaacggtacgactggaccggcaagaactgggtctactcccatgacggagtcagtcttcatgaactgcttgccgcagagctgaccaaggctcttaagacgaaactggatctctctagcctggcctactccgggaaggatgcatagctcgaggacggggtgaactacgcctgaggatccgatctttttccctctgccaaaaattatggggacatcatgaagccccttgagcatctgacttctggctaataaaggaaatttattttcattgcaatagtgtgttggaattttttgtgtctctcactcggaagcaattcgttgatctgaatttcgaccacccataatacccattaccctggtagataagtagcatggcgggttaatcattaactacaaggaacccctagtgatggagttggccactccctctctgcgcgctcgctcgctcactgaggccgggcgaccaaaggtcgcccgacgcccgggctttgcccgggcggcctcagtgagcgagcgagcgcgcagccttaattaacctaattcactggccgtcgttttacaacgtcgtgactgggaaaaccctggcgttacccaacttaatcgccttgcagcacatccccctttcgccagctggcgtaatagcgaagaggcccgcaccgatcgcccttcccaacagttgcgcagcctgaatggcgaatgggacgcgccctgtagcggcgcattaagcgcggcgggtgtggtggttacgcgcagcgtgaccgctacacttgccagcgccctagcgcccgctcctttcgctttcttcccttcctttctcgccacgttcgccggctttccccgtcaagctctaaatcgggggctccctttagggttccgatttagtgctttacggcacctcgaccccaaaaaacttgattagggtgatggttcacgtagtgggccatcgccctgatagacggtttttcgccctttgacgttggagtccacgttctttaatagtggactcttgttccaaactggaacaacactcaaccctatctcggtctattcttttgatttataagggattttgccgatttcggcctattggttaaaaaatgagctgatttaacaaaaatttaacgcgaattttaacaaaatattaacgcttacaatttaggtggcacttttcggggaaatgtgcgcggaacccctatttgtttatttttctaaatacattcaaatatgtatccgctcatgagacaataaccctgataaatgcttcaataatattgaaaaaggaagagtatgagtattcaacatttccgtgtcgcccttattcccttttttgcggcattttgccttcctgtttttgctcacccagaaacgctggtgaaagtaaaagatgctgaagatcagttgggtgcacgagtgggttacatcgaactggatctcaacagcggtaagatccttgagagttttcgccccgaagaacgttttccaatgatgagcacttttaaagttctgctatgtggcgcggtattatcccgtattgacgccgggcaagagcaactcggtcgccgcatacactattctcagaatgacttggttgagtactcaccagtcacagaaaagcatcttacggatggcatgacagtaagagaattatgcagtgctgccataaccatgagtgataacactgcggccaacttacttctgacaacgatcggaggaccgaaggagctaaccgcttttttgcacaacatgggggatcatgtaactcgccttgatcgttgggaaccggagctgaatgaagccataccaaacgacgagcgtgacaccacgatgcctgtagcaatggcaacaacgttgcgcaaactattaactggcgaactacttactctagcttcccggcaacaattaatagactggatggaggcggataaagttgcaggaccacttctgcgctcggcccttccggctggctggtttattgctgataaatctggagccggtgagcgtgggtctcgcggtatcattgcagcactggggccagatggtaagccctcccgtatcgtagttatctacacgacggggagtcaggcaactatggatgaacgaaatagacagatcgctgagataggtgcctcactgattaagcattggtaactgtcagaccaagtttactcatatatactttagattgatttaaaacttcatttttaatttaaaaggatctaggtgaagatcctttttgataatctcatgaccaaaatcccttaacgtgagttttcgttccactgagcgtcagaccccgtagaaaagatcaaaggatcttcttgagatcctttttttctgcgcgtaatctgctgcttgcaaacaaaaaaaccaccgctaccagcggtggtttgtttgccggatcaagagctaccaactctttttccgaaggtaactggcttcagcagagcgcagataccaaatactgttcttctagtgtagccgtagttaggccaccacttcaagaactctgtagcaccgcctacatacctcgctctgctaatcctgttaccagtggctgctgccagtggcgataagtcgtgtcttaccgggttggactcaagacgatagttaccggataaggcgcagcggtcgggctgaacggggggttcgtgcacacagcccagcttggagcgaacgacctacaccgaactgagatacctacagcgtgagctatgagaaagcgccacgcttcccgaagggagaaaggcggacaggtatccggtaagcggcagggtcggaacaggagagcgcacgagggagcttccagggggaaacgcctggtatctttatagtcctgtcgggtttcgccacctctgacttgagcgtcgatttttgtgatgctcgtcaggggggcggagcctatggaaaaacgccagcaacgcggcctttttacggttcctggccttttgctggccttttgctcacatgttctttcctgcgttatcccctgattctgtggataaccgtattaccgcctttgagtgagctgataccgctcgccgcagccgaacgaccgagcgcagcgagtcagtgagcgaggaagcggaagagcgcccaatacgcaaaccgcctctccccgcgcgttggccgattcattaatgcagctggcacgacaggtttcccgactggaaagcgggcagtgagcgcaacgcaattaatgtgagttagctcactcattaggcaccccaggctttacactttatgcttccggctcgtatgttgtgtggaattgtgagcggataacaatttcacacaggaaacagctatgaccatgattacgccagatttaattaag

SEQ ID NO: 592 - DNA, 4883 bp, Artificial Sequence
  Description of Artificial Sequence: Synthetic polynucleotide
gccttaattaggctgcgcgctcgctcgctcactgaggccgcccgggcaaagcccgggcgtcgggcgacctttggtcgcccggcctcagtgagcgagcgagcgcgcagagagggagtggccaactccatcactaggggttccttgtagttaatgattaacccgccatgctacttatctaccagggtaatggggatcctctagaactatagctagtcgacattgattattgactagttattaatagtaatcaattacggggtcattagttcatagcccatatatggagttccgcgttacataacttacggtaaatggcccgcctggctgaccgcccaacgacccccgcccattgacgtcaataatgacgtatgttcccatagtaacgccaatagggactttccattgacgtcaatgggtggagtatttacggtaaactgcccacttggcagtacatcaagtgtatcatatgccaagtacgccccctattgacgtcaatgacggtaaatggcccgcctggcattatgcccagtacatgaccttatgggactttcctacttggcagtacatctacgtattagtcatcgctattaccatgtcgaggccacgttctgcttcactctccccatctcccccccctccccacccccaattttgtatttatttattttttaattattttgtgcagcgatgggggcggggggggggggcgcgcgccaggcggggcggggcggggcgaggggcggggcggggcgaggcggagaggtgcggcggcagccaatcagagcggcgcgctccgaaagtttccttttatggcgaggcggcggcggcggcggccctataaaaagcgaagcgcgcggcgggcgggagcaagcttgaactgaaaaaccagaaagttaactggtaagtttagtctttttgtcttttatttcaggtcccggatccggtggtggtgcaaatcaaagaactgctcctcagtggatgttgcctttacttctaggcctgtacggaagtgttacttctgctctaaaagctgcggaattgtacccgcggccgatccaccggtatgtggactctcgggcgacgcgccgtagccggtctcctggcttccccaagccctgcacaggcacagaccctcacacgggtcccacggccagctgaattggccccactctgcggtcgccggggcctgcgaaccgatatagacgcaacgtgcactccccgacgagcaagttccaaccagagagggctcaaccagatttggaacgtcaagaagcagagtgtctatttgatgaatctgagaaaatccgggacccttgggcaccccggatctcttgatgaaactacctatgaaaggctggccgaggagacgctggactctctggcagagttcttcgaggatctggcagacaagccatacacgtttgaggactatgatgtctcttttggatctggcgtcctgacggttaaactgggaggggatctcggaacctacgttatcaacaaacagactcccaataagcagatctggttgtctagtccatccagtggtcctaaacgctatgactggacgggcaagaactgggtgtactcccacgacggagttagccttcatgaactgctggccgcagagctgactaaagctcttaagactaaactggatctctctagcctggcctactccgggaaagatgcctagctcgaggacggggtgaactacgcctgaggatccgatctttttccctctgccaaaaattatggggacatcatgaagccccttgagcatctgacttctggctaataaaggaaatttattttcattgcaatagtgtgttggaattttttgtgtctctcactcggaagcaattcgttgatctgaatttcgaccacccataatacccattaccctggtagataagtagcatggcgggttaatcattaactacaaggaacccctagtgatggagttggccactccctctctgcgcgctcgctcgctcactgaggccgggcgaccaaaggtcgcccgacgcccgggctttgcccgggcggcctcagtgagcgagcgagcgcgcagccttaattaacctaattcactggccgtcgttttacaacgtcgtgactgggaaaaccctggcgttacccaacttaatcgccttgcagcacatccccctttcgccagctggcgtaatagcgaagaggcccgcaccgatcgcccttcccaacagttgcgcagcctgaatggcgaatgggacgcgccctgtagcggcgcattaagcgcggcgggtgtggtggttacgcgcagcgtgaccgctacacttgccagcgccctagcgcccgctcctttcgctttcttcccttcctttctcgccacgttcgccggctttccccgtcaagctctaaatcgggggctccctttagggttccgatttagtgctttacggcacctcgaccccaaaaaacttgattagggtgatggttcacgtagtgggccatcgccctgatagacggtttttcgccctttgacgttggagtccacgttctttaatagtggactcttgttccaaactggaacaacactcaaccctatctcggtctattcttttgatttataagggattttgccgatttcggcctattggttaaaaaatgagctgatttaacaaaaatttaacgcgaattttaacaaaatattaacgcttacaatttaggtggcacttttcggggaaatgtgcgcggaacccctatttgtttatttttctaaatacattcaaatatgtatccgctcatgagacaataaccctgataaatgcttcaataatattgaaaaaggaagagtatgagtattcaacatttccgtgtcgcccttattcccttttttgcggcattttgccttcctgtttttgctcacccagaaacgctggtgaaagtaaaagatgctgaagatcagttgggtgcacgagtgggttacatcgaactggatctcaacagcggtaagatccttgagagttttcgccccgaagaacgttttccaatgatgagcacttttaaagttctgctatgtggcgcggtattatcccgtattgacgccgggcaagagcaactcggtcgccgcatacactattctcagaatgacttggttgagtactcaccagtcacagaaaagcatcttacggatggcatgacagtaagagaattatgcagtgctgccataaccatgagtgataacactgcggccaacttacttctgacaacgatcggaggaccgaaggagctaaccgcttttttgcacaacatgggggatcatgtaactcgccttgatcgttgggaaccggagctgaatgaagccataccaaacgacgagcgtgacaccacgatgcctgtagcaatggcaacaacgttgcgcaaactattaactggcgaactacttactctagcttcccggcaacaattaatagactggatggaggcggataaagttgcaggaccacttctgcgctcggcccttccggctggctggtttattgctgataaatctggagccggtgagcgtgggtctcgcggtatcattgcagcactggggccagatggtaagccctcccgtatcgtagttatctacacgacggggagtcaggcaactatggatgaacgaaatagacagatcgctgagataggtgcctcactgattaagcattggtaactgtcagaccaagtttactcatatatactttagattgatttaaaacttcatttttaatttaaaaggatctaggtgaagatcctttttgataatctcatgaccaaaatcccttaacgtgagttttcgttccactgagcgtcagaccccgtagaaaagatcaaaggatcttcttgagatcctttttttctgcgcgtaatctgctgcttgcaaacaaaaaaaccaccgctaccagcggtggtttgtttgccggatcaagagctaccaactctttttccgaaggtaactggcttcagcagagcgcagataccaaatactgttcttctagtgtagccgtagttaggccaccacttcaagaactctgtagcaccgcctacatacctcgctctgctaatcctgttaccagtggctgctgccagtggcgataagtcgtgtcttaccgggttggactcaagacgatagttaccggataaggcgcagcggtcgggctgaacggggggttcgtgcacacagcccagcttggagcgaacgacctacaccgaactgagatacctacagcgtgagctatgagaaagcgccacgcttcccgaagggagaaaggcggacaggtatccggtaagcggcagggtcggaacaggagagcgcacgagggagcttccagggggaaacgcctggtatctttatagtcctgtcgggtttcgccacctctgacttgagcgtcgatttttgtgatgctcgtcaggggggcggagcctatggaaaaacgccagcaacgcggcctttttacggttcctggccttttgctggccttttgctcacatgttctttcctgcgttatcccctgattctgtggataaccgtattaccgcctttgagtgagctgataccgctcgccgcagccgaacgaccgagcgcagcgagtcagtgagcgaggaagcggaagagcgcccaatacgcaaaccgcctctccccgcgcgttggccgattcattaatgcagctggcacgacaggtttcccgactggaaagcgggcagtgagcgcaacgcaattaatgtgagttagctcactcattaggcaccccaggctttacactttatgcttccggctcgtatgttgtgtggaattgtgagcggataacaatttcacacaggaaacagctatgaccatgattacgccagatttaattaag

SEQ ID NO: 593 - DNA, 4883 bp, Artificial Sequence
  Description of Artificial Sequence: Synthetic polynucleotide
gccttaattaggctgcgcgctcgctcgctcactgaggccgcccgggcaaagcccgggcgtcgggcgacctttggtcgcccggcctcagtgagcgagcgagcgcgcagagagggagtggccaactccatcactaggggttccttgtagttaatgattaacccgccatgctacttatctaccagggtaatggggatcctctagaactatagctagtcgacattgattattgactagttattaatagtaatcaattacggggtcattagttcatagcccatatatggagttccgcgttacataacttacggtaaatggcccgcctggctgaccgcccaacgacccccgcccattgacgtcaataatgacgtatgttcccatagtaacgccaatagggactttccattgacgtcaatgggtggagtatttacggtaaactgcccacttggcagtacatcaagtgtatcatatgccaagtacgccccctattgacgtcaatgacggtaaatggcccgcctggcattatgcccagtacatgaccttatgggactttcctacttggcagtacatctacgtattagtcatcgctattaccatgtcgaggccacgttctgcttcactctccccatctcccccccctccccacccccaattttgtatttatttattttttaattattttgtgcagcgatgggggcggggggggggggcgcgcgccaggcggggcggggcggggcgaggggcggggcggggcgaggcggagaggtgcggcggcagccaatcagagcggcgcgctccgaaagtttccttttatggcgaggcggcggcggcggcggccctataaaaagcgaagcgcgcggcgggcgggagcaagcttgaactgaaaaaccagaaagttaactggtaagtttagtctttttgtcttttatttcaggtcccggatccggtggtggtgcaaatcaaagaactgctcctcagtggatgttgcctttacttctaggcctgtacggaagtgttacttctgctctaaaagctgcggaattgtacccgcggccgatccaccggtatgtggactctggggcgacgcgccgtggccgggctcctggcatccccatcccctgcgcaggcgcaaaccctcacacgggttccacggccagctgaactggccccactgtgcggccggcggggcctgagaacagatattgacgcaacgtgcactcccagaagagccagcagcaaccagagggggttgaatcagatctggaacgtcaagaagcagtcagtgtacctgatgaatctccgaaaaagcgggacccttggtcaccccggatctctcgatgaaaccacatatgaacggctggccgaggaaacgctggactccctggccgagttcttcgaggacctggcagacaagccgtacaccttcgaagactatgatgtttcattcggaagtggcgtgctgacggtcaaactgggaggcgatctgggaacctacgttataaacaaacagactcccaataaacagatctggttgtctagtccatccagcggtcctaaacgctatgactggacgggcaagaactgggtctactcccacgacggagttagccttcacgaactgttggccgcagagctgacaaaggcgcttaagacgaaactggatctctctagcctggcctactccggcaaagatgcctagctcgaggacggggtgaactacgcctgaggatccgatctttttccctctgccaaaaattatggggacatcatgaagccccttgagcatctgacttctggctaataaaggaaatttattttcattgcaatagtgtgttggaattttttgtgtctctcactcggaagcaattcgttgatctgaatttcgaccacccataatacccattaccctggtagataagtagcatggcgggttaatcattaactacaaggaacccctagtgatggagttggccactccctctctgcgcgctcgctcgctcactgaggccgggcgaccaaaggtcgcccgacgcccgggctttgcccgggcggcctcagtgagcgagcgagcgcgcagccttaattaacctaattcactggccgtcgttttacaacgtcgtgactgggaaaaccctggcgttacccaacttaatcgccttgcagcacatccccctttcgccagctggcgtaatagcgaagaggcccgcaccgatcgcccttcccaacagttgcgcagcctgaatggcgaatgggacgcgccctgtagcggcgcattaagcgcggcgggtgtggtggttacgcgcagcgtgaccgctacacttgccagcgccctagcgcccgctcctttcgctttcttcccttcctttctcgccacgttcgccggctttccccgtcaagctctaaatcgggggctccctttagggttccgatttagtgctttacggcacctcgaccccaaaaaacttgattagggtgatggttcacgtagtgggccatcgccctgatagacggtttttcgccctttgacgttggagtccacgttctttaatagtggactcttgttccaaactggaacaacactcaaccctatctcggtctattcttttgatttataagggattttgccgatttcggcctattggttaaaaaatgagctgatttaacaaaaatttaacgcgaattttaacaaaatattaacgcttacaatttaggtggcacttttcggggaaatgtgcgcggaacccctatttgtttatttttctaaatacattcaaatatgtatccgctcatgagacaataaccctgataaatgcttcaataatattgaaaaaggaagagtatgagtattcaacatttccgtgtcgcccttattcccttttttgcggcattttgccttcctgtttttgctcacccagaaacgctggtgaaagtaaaagatgctgaagatcagttgggtgcacgagtgggttacatcgaactggatctcaacagcggtaagatccttgagagttttcgccccgaagaacgttttccaatgatgagcacttttaaagttctgctatgtggcgcggtattatcccgtattgacgccgggcaagagcaactcggtcgccgcatacactattctcagaatgacttggttgagtactcaccagtcacagaaaagcatcttacggatggcatgacagtaagagaattatgcagtgctgccataaccatgagtgataacactgcggccaacttacttctgacaacgatcggaggaccgaaggagctaaccgcttttttgcacaacatgggggatcatgtaactcgccttgatcgttgggaaccggagctgaatgaagccataccaaacgacgagcgtgacaccacgatgcctgtagcaatggcaacaacgttgcgcaaactattaactggcgaactacttactctagcttcccggcaacaattaatagactggatggaggcggataaagttgcaggaccacttctgcgctcggcccttccggctggctggtttattgctgataaatctggagccggtgagcgtgggtctcgcggtatcattgcagcactggggccagatggtaagccctcccgtatcgtagttatctacacgacggggagtcaggcaactatggatgaacgaaatagacagatcgctgagataggtgcctcactgattaagcattggtaactgtcagaccaagtttactcatatatactttagattgatttaaaacttcatttttaatttaaaaggatctaggtgaagatcctttttgataatctcatgaccaaaatcccttaacgtgagttttcgttccactgagcgtcagaccccgtagaaaagatcaaaggatcttcttgagatcctttttttctgcgcgtaatctgctgcttgcaaacaaaaaaaccaccgctaccagcggtggtttgtttgccggatcaagagctaccaactctttttccgaaggtaactggcttcagcagagcgcagataccaaatactgttcttctagtgtagccgtagttaggccaccacttcaagaactctgtagcaccgcctacatacctcgctctgctaatcctgttaccagtggctgctgccagtggcgataagtcgtgtcttaccgggttggactcaagacgatagttaccggataaggcgcagcggtcgggctgaacggggggttcgtgcacacagcccagcttggagcgaacgacctacaccgaactgagatacctacagcgtgagctatgagaaagcgccacgcttcccgaagggagaaaggcggacaggtatccggtaagcggcagggtcggaacaggagagcgcacgagggagcttccagggggaaacgcctggtatctttatagtcctgtcgggtttcgccacctctgacttgagcgtcgatttttgtgatgctcgtcaggggggcggagcctatggaaaaacgccagcaacgcggcctttttacggttcctggccttttgctggccttttgctcacatgttctttcctgcgttatcccctgattctgtggataaccgtattaccgcctttgagtgagctgataccgctcgccgcagccgaacgaccgagcgcagcgagtcagtgagcgaggaagcggaagagcgcccaatacgcaaaccgcctctccccgcgcgttggccgattcattaatgcagctggcacgacaggtttcccgactggaaagcgggcagtgagcgcaacgcaattaatgtgagttagctcactcattaggcaccccaggctttacactttatgcttccggctcgtatgttgtgtggaattgtgagcggataacaatttcacacaggaaacagctatgaccatgattacgccagatttaattaag

SEQ ID NO: 594 - DNA, 4850 bp, Artificial Sequence
  Description of Artificial Sequence: Synthetic polynucleotide
gccttaattaggctgcgcgctcgctcgctcactgaggccgcccgggcaaagcccgggcgtcgggcgacctttggtcgcccggcctcagtgagcgagcgagcgcgcagagagggagtggccaactccatcactaggggttccttgtagttaatgattaacccgccatgctacttatctaccagggtaatggggatcctctagaactatagctagtcgacattgattattgactagttattaatagtaatcaattacggggtcattagttcatagcccatatatggagttccgcgttacataacttacggtaaatggcccgcctggctgaccgcccaacgacccccgcccattgacgtcaataatgacgtatgttcccatagtaacgccaatagggactttccattgacgtcaatgggtggagtatttacggtaaactgcccacttggcagtacatcaagtgtatcatatgccaagtacgccccctattgacgtcaatgacggtaaatggcccgcctggcattatgcccagtacatgaccttatgggactttcctacttggcagtacatctacgtattagtcatcgctattaccatgtcgaggccacgttctgcttcactctccccatctcccccccctccccacccccaattttgtatttatttattttttaattattttgtgcagcgatgggggcggggggggggggcgcgcgccaggcggggcggggcggggcgaggggcggggcggggcgaggcggagaggtgcggcggcagccaatcagagcggcgcgctccgaaagtttccttttatggcgaggcggcggcggcggcggccctataaaaagcgaagcgcgcggcgggcgggagcaagcttgaactgaaaaaccagaaagttaactggtaagtttagtctttttgtcttttatttcaggtcccggatccggtggtggtgcaaatcaaagaactgctcctcagtggatgttgcctttacttctaggcctgtacggaagtgttacttctgctctaaaagctgcggaattgtacccgcggccgatccaccggtgccgccaccatggcgccctacagcctactggtgactcggctgcagaaagctctgggtgtgcggcagtaccatgtggcctcagtcctgtgcctgcgcaccgacatcgatgcgacctgcacgccccgccgcgcaagttcgaaccaacgtggcctcaaccagatttggaatgtcaaaaagcagagtgtctatttgatgaatttgaggaaatctggaactttgggccacccaggctctctagatgagaccacctatgaaagactagcagaggaaacgctggactctttagcagagttttttgaagaccttgcagacaagccatacacgtttgaggactatgatgtctcctttgggagtggtgtcttaactgtcaaactgggtggagatctaggaacctatgtgatcaacaagcagacgccaaacaagcaaatctggctatcttctccatccagtggacctaagcgttatgactggactgggaaaaactgggtgttctcccacgacggcgtgtccctccatgagctgctggccgcagagctcactaaagccttaaaaaccaaactggacttgtcttggttggcctattccggaaaagatgcttgactcgaggacggggtgaactacgcctgaggatccgatctttttccctctgccaaaaattatggggacatcatgaagccccttgagcatctgacttctggctaataaaggaaatttattttcattgcaatagtgtgttggaattttttgtgtctctcactcggaagcaattcgttgatctgaatttcgaccacccataatacccattaccctggtagataagtagcatggcgggttaatcattaactacaaggaacccctagtgatggagttggccactccctctctgcgcgctcgctcgctcactgaggccgggcgaccaaaggtcgcccgacgcccgggctttgcccgggcggcctcagtgagcgagcgagcgcgcagccttaattaacctaattcactggccgtcgttttacaacgtcgtgactgggaaaaccctggcgttacccaacttaatcgccttgcagcacatccccctttcgccagctggcgtaatagcgaagaggcccgcaccgatcgcccttcccaacagttgcgcagcctgaatggcgaatgggacgcgccctgtagcggcgcattaagcgcggcgggtgtggtggttacgcgcagcgtgaccgctacacttgccagcgccctagcgcccgctcctttcgctttcttcccttcctttctcgccacgttcgccggctttccccgtcaagctctaaatcgggggctccctttagggttccgatttagtgctttacggcacctcgaccccaaaaaacttgattagggtgatggttcacgtagtgggccatcgccctgatagacggtttttcgccctttgacgttggagtccacgttctttaatagtggactcttgttccaaactggaacaacactcaaccctatctcggtctattcttttgatttataagggattttgccgatttcggcctattggttaaaaaatgagctgatttaacaaaaatttaacgcgaattttaacaaaatattaacgcttacaatttaggtggcacttttcggggaaatgtgcgcggaacccctatttgtttatttttctaaatacattcaaatatgtatccgctcatgagacaataaccctgataaatgcttcaataatattgaaaaaggaagagtatgagtattcaacatttccgtgtcgcccttattcccttttttgcggcattttgccttcctgtttttgctcacccagaaacgctggtgaaagtaaaagatgctgaagatcagttgggtgcacgagtgggttacatcgaactggatctcaacagcggtaagatccttgagagttttcgccccgaagaacgttttccaatgatgagcacttttaaagttctgctatgtggcgcggtattatcccgtattgacgccgggcaagagcaactcggtcgccgcatacactattctcagaatgacttggttgagtactcaccagtcacagaaaagcatcttacggatggcatgacagtaagagaattatgcagtgctgccataaccatgagtgataacactgcggccaacttacttctgacaacgatcggaggaccgaaggagctaaccgcttttttgcacaacatgggggatcatgtaactcgccttgatcgttgggaaccggagctgaatgaagccataccaaacgacgagcgtgacaccacgatgcctgtagcaatggcaacaacgttgcgcaaactattaactggcgaactacttactctagcttcccggcaacaattaatagactggatggaggcggataaagttgcaggaccacttctgcgctcggcccttccggctggctggtttattgctgataaatctggagccggtgagcgtgggtctcgcggtatcattgcagcactggggccagatggtaagccctcccgtatcgtagttatctacacgacggggagtcaggcaactatggatgaacgaaatagacagatcgctgagataggtgcctcactgattaagcattggtaactgtcagaccaagtttactcatatatactttagattgatttaaaacttcatttttaatttaaaaggatctaggtgaagatcctttttgataatctcatgaccaaaatcccttaacgtgagttttcgttccactgagcgtcagaccccgtagaaaagatcaaaggatcttcttgagatcctttttttctgcgcgtaatctgctgcttgcaaacaaaaaaaccaccgctaccagcggtggtttgtttgccggatcaagagctaccaactctttttccgaaggtaactggcttcagcagagcgcagataccaaatactgttcttctagtgtagccgtagttaggccaccacttcaagaactctgtagcaccgcctacatacctcgctctgctaatcctgttaccagtggctgctgccagtggcgataagtcgtgtcttaccgggttggactcaagacgatagttaccggataaggcgcagcggtcgggctgaacggggggttcgtgcacacagcccagcttggagcgaacgacctacaccgaactgagatacctacagcgtgagctatgagaaagcgccacgcttcccgaagggagaaaggcggacaggtatccggtaagcggcagggtcggaacaggagagcgcacgagggagcttccagggggaaacgcctggtatctttatagtcctgtcgggtttcgccacctctgacttgagcgtcgatttttgtgatgctcgtcaggggggcggagcctatggaaaaacgccagcaacgcggcctttttacggttcctggccttttgctggccttttgctcacatgttctttcctgcgttatcccctgattctgtggataaccgtattaccgcctttgagtgagctgataccgctcgccgcagccgaacgaccgagcgcagcgagtcagtgagcgaggaagcggaagagcgcccaatacgcaaaccgcctctccccgcgcgttggccgattcattaatgcagctggcacgacaggtttcccgactggaaagcgggcagtgagcgcaacgcaattaatgtgagttagctcactcattaggcaccccaggctttacactttatgcttccggctcgtatgttgtgtggaattgtgagcggataacaatttcacacaggaaacagctatgaccatgattacgccagatttaattaag

SEQ ID NO: 595 - DNA, 4850 bp, Artificial Sequence
  Description of Artificial Sequence: Synthetic polynucleotide
gccttaattaggctgcgcgctcgctcgctcactgaggccgcccgggcaaagcccgggcgtcgggcgacctttggtcgcccggcctcagtgagcgagcgagcgcgcagagagggagtggccaactccatcactaggggttccttgtagttaatgattaacccgccatgctacttatctaccagggtaatggggatcctctagaactatagctagtcgacattgattattgactagttattaatagtaatcaattacggggtcattagttcatagcccatatatggagttccgcgttacataacttacggtaaatggcccgcctggctgaccgcccaacgacccccgcccattgacgtcaataatgacgtatgttcccatagtaacgccaatagggactttccattgacgtcaatgggtggagtatttacggtaaactgcccacttggcagtacatcaagtgtatcatatgccaagtacgccccctattgacgtcaatgacggtaaatggcccgcctggcattatgcccagtacatgaccttatgggactttcctacttggcagtacatctacgtattagtcatcgctattaccatgtcgaggccacgttctgcttcactctccccatctcccccccctccccacccccaattttgtatttatttattttttaattattttgtgcagcgatgggggcggggggggggggcgcgcgccaggcggggcggggcggggcgaggggcggggcggggcgaggcggagaggtgcggcggcagccaatcagagcggcgcgctccgaaagtttccttttatggcgaggcggcggcggcggcggccctataaaaagcgaagcgcgcggcgggcgggagcaagcttgaactgaaaaaccagaaagttaactggtaagtttagtctttttgtcttttatttcaggtcccggatccggtggtggtgcaaatcaaagaactgctcctcagtggatgttgcctttacttctaggcctgtacggaagtgttacttctgctctaaaagctgcggaattgtacccgcggccgatccaccggtgccgccaccatggctttacttactgcggccgcccggctcttgggaaccaagaatgcatcttgtcttgttcttgcagcccggcatgctagtctgcgcaccgacatcgatgcgacctgcacgccccgccgcgcaagttcgaaccaacgtggcctcaaccagatttggaatgtcaaaaagcagagtgtctatttgatgaatttgaggaaatctggaactttgggccacccaggctctctagatgagaccacctatgaaagactagcagaggaaacgctggactctttagcagagttttttgaagaccttgcagacaagccatacacgtttgaggactatgatgtctcctttgggagtggtgtcttaactgtcaaactgggtggagatctaggaacctatgtgatcaacaagcagacgccaaacaagcaaatctggctatcttctccatccagtggacctaagcgttatgactggactgggaaaaactgggtgttctcccacgacggcgtgtccctccatgagctgctggccgcagagctcactaaagccttaaaaaccaaactggacttgtcttggttggcctattccggaaaagatgcttgactcgaggacggggtgaactacgcctgaggatccgatctttttccctctgccaaaaattatggggacatcatgaagccccttgagcatctgacttctggctaataaaggaaatttattttcattgcaatagtgtgttggaattttttgtgtctctcactcggaagcaattcgttgatctgaatttcgaccacccataatacccattaccctggtagataagtagcatggcgggttaatcattaactacaaggaacccctagtgatggagttggccactccctctctgcgcgctcgctcgctcactgaggccgggcgaccaaaggtcgcccgacgcccgggctttgcccgggcggcctcagtgagcgagcgagcgcgcagccttaattaacctaattcactggccgtcgttttacaacgtcgtgactgggaaaaccctggcgttacccaacttaatcgccttgcagcacatccccctttcgccagctggcgtaatagcgaagaggcccgcaccgatcgcccttcccaacagttgcgcagcctgaatggcgaatgggacgcgccctgtagcggcgcattaagcgcggcgggtgtggtggttacgcgcagcgtgaccgctacacttgccagcgccctagcgcccgctcctttcgctttcttcccttcctttctcgccacgttcgccggctttccccgtcaagctctaaatcgggggctccctttagggttccgatttagtgctttacggcacctcgaccccaaaaaacttgattagggtgatggttcacgtagtgggccatcgccctgatagacggtttttcgccctttgacgttggagtccacgttctttaatagtggactcttgttccaaactggaacaacactcaaccctatctcggtctattcttttgatttataagggattttgccgatttcggcctattggttaaaaaatgagctgatttaacaaaaatttaacgcgaattttaacaaaatattaacgcttacaatttaggtggcacttttcggggaaatgtgcgcggaacccctatttgtttatttttctaaatacattcaaatatgtatccgctcatgagacaataaccctgataaatgcttcaataatattgaaaaaggaagagtatgagtattcaacatttccgtgtcgcccttattcccttttttgcggcattttgccttcctgtttttgctcacccagaaacgctggtgaaagtaaaagatgctgaagatcagttgggtgcacgagtgggttacatcgaactggatctcaacagcggtaagatccttgagagttttcgccccgaagaacgttttccaatgatgagcacttttaaagttctgctatgtggcgcggtattatcccgtattgacgccgggcaagagcaactcggtcgccgcatacactattctcagaatgacttggttgagtactcaccagtcacagaaaagcatcttacggatggcatgacagtaagagaattatgcagtgctgccataaccatgagtgataacactgcggccaacttacttctgacaacgatcggaggaccgaaggagctaaccgcttttttgcacaacatgggggatcatgtaactcgccttgatcgttgggaaccggagctgaatgaagccataccaaacgacgagcgtgacaccacgatgcctgtagcaatggcaacaacgttgcgcaaactattaactggcgaactacttactctagcttcccggcaacaattaatagactggatggaggcggataaagttgcaggaccacttctgcgctcggcccttccggctggctggtttattgctgataaatctggagccggtgagcgtgggtctcgcggtatcattgcagcactggggccagatggtaagccctcccgtatcgtagttatctacacgacggggagtcaggcaactatggatgaacgaaatagacagatcgctgagataggtgcctcactgattaagcattggtaactgtcagaccaagtttactcatatatactttagattgatttaaaacttcatttttaatttaaaaggatctaggtgaagatcctttttgataatctcatgaccaaaatcccttaacgtgagttttcgttccactgagcgtcagaccccgtagaaaagatcaaaggatcttcttgagatcctttttttctgcgcgtaatctgctgcttgcaaacaaaaaaaccaccgctaccagcggtggtttgtttgccggatcaagagctaccaactctttttccgaaggtaactggcttcagcagagcgcagataccaaatactgttcttctagtgtagccgtagttaggccaccacttcaagaactctgtagcaccgcctacatacctcgctctgctaatcctgttaccagtggctgctgccagtggcgataagtcgtgtcttaccgggttggactcaagacgatagttaccggataaggcgcagcggtcgggctgaacggggggttcgtgcacacagcccagcttggagcgaacgacctacaccgaactgagatacctacagcgtgagctatgagaaagcgccacgcttcccgaagggagaaaggcggacaggtatccggtaagcggcagggtcggaacaggagagcgcacgagggagcttccagggggaaacgcctggtatctttatagtcctgtcgggtttcgccacctctgacttgagcgtcgatttttgtgatgctcgtcaggggggcggagcctatggaaaaacgccagcaacgcggcctttttacggttcctggccttttgctggccttttgctcacatgttctttcctgcgttatcccctgattctgtggataaccgtattaccgcctttgagtgagctgataccgctcgccgcagccgaacgaccgagcgcagcgagtcagtgagcgaggaagcggaagagcgcccaatacgcaaaccgcctctccccgcgcgttggccgattcattaatgcagctggcacgacaggtttcccgactggaaagcgggcagtgagcgcaacgcaattaatgtgagttagctcactcattaggcaccccaggctttacactttatgcttccggctcgtatgttgtgtggaattgtgagcggataacaatttcacacaggaaacagctatgaccatgattacgccagatttaattaag

SEQ ID NO: 596 - DNA, 4892 bp, Artificial Sequence
  Description of Artificial Sequence: Synthetic polynucleotide
gccttaattaggctgcgcgctcgctcgctcactgaggccgcccgggcaaagcccgggcgtcgggcgacctttggtcgcccggcctcagtgagcgagcgagcgcgcagagagggagtggccaactccatcactaggggttccttgtagttaatgattaacccgccatgctacttatctaccagggtaatggggatcctctagaactatagctagtcgacattgattattgactagttattaatagtaatcaattacggggtcattagttcatagcccatatatggagttccgcgttacataacttacggtaaatggcccgcctggctgaccgcccaacgacccccgcccattgacgtcaataatgacgtatgttcccatagtaacgccaatagggactttccattgacgtcaatgggtggagtatttacggtaaactgcccacttggcagtacatcaagtgtatcatatgccaagtacgccccctattgacgtcaatgacggtaaatggcccgcctggcattatgcccagtacatgaccttatgggactttcctacttggcagtacatctacgtattagtcatcgctattaccatgtcgaggccacgttctgcttcactctccccatctcccccccctccccacccccaattttgtatttatttattttttaattattttgtgcagcgatgggggcggggggggggggcgcgcgccaggcggggcggggcggggcgaggggcggggcggggcgaggcggagaggtgcggcggcagccaatcagagcggcgcgctccgaaagtttccttttatggcgaggcggcggcggcggcggccctataaaaagcgaagcgcgcggcgggcgggagcaagcttgaactgaaaaaccagaaagttaactggtaagtttagtctttttgtcttttatttcaggtcccggatccggtggtggtgcaaatcaaagaactgctcctcagtggatgttgcctttacttctaggcctgtacggaagtgttacttctgctctaaaagctgcggaattgtacccgcggccgatccaccggtgccgccaccatggctttacttactgcggccgcccggctcttgggaaccaagaatgcatcttgtcttgttcttgcagcccggcatgctagtctgcgcaccgacatcgatgcgacctgcacgccccgccgcgcaagttcgaaccaacgtggcctcaaccagatttggaatgtcaaaaagcagagtgtctatttgatgaatttgaggaaatctggaactttgggccacccaggctctctagatgagaccacctatgaaagactagcagaggaaacgctggactctttagcagagttttttgaagaccttgcagacaagccatacacgtttgaggactatgatgtctcctttgggagtggtgtcttaactgtcaaactgggtggagatctaggaacctatgtgatcaacaagcagacgccaaacaagcaaatctggctatcttctccatccagtggacctaagcgttatgactggactgggaaaaactgggtgttctcccacgacggcgtgtccctccatgagctgctggccgcagagctcactaaagccttaaaaaccaaactggacttgtcttggttggcctattccggaaaagatgcttatccttatgacgtgcctgactatgccagcctgggaggaccttgactcgaggacggggtgaactacgcctgaggatccgatctttttccctctgccaaaaattatggggacatcatgaagccccttgagcatctgacttctggctaataaaggaaatttattttcattgcaatagtgtgttggaattttttgtgtctctcactcggaagcaattcgttgatctgaatttcgaccacccataatacccattaccctggtagataagtagcatggcgggttaatcattaactacaaggaacccctagtgatggagttggccactccctctctgcgcgctcgctcgctcactgaggccgggcgaccaaaggtcgcccgacgcccgggctttgcccgggcggcctcagtgagcgagcgagcgcgcagccttaattaacctaattcactggccgtcgttttacaacgtcgtgactgggaaaaccctggcgttacccaacttaatcgccttgcagcacatccccctttcgccagctggcgtaatagcgaagaggcccgcaccgatcgcccttcccaacagttgcgcagcctgaatggcgaatgggacgcgccctgtagcggcgcattaagcgcggcgggtgtggtggttacgcgcagcgtgaccgctacacttgccagcgccctagcgcccgctcctttcgctttcttcccttcctttctcgccacgttcgccggctttccccgtcaagctctaaatcgggggctccctttagggttccgatttagtgctttacggcacctcgaccccaaaaaacttgattagggtgatggttcacgtagtgggccatcgccctgatagacggtttttcgccctttgacgttggagtccacgttctttaatagtggactcttgttccaaactggaacaacactcaaccctatctcggtctattcttttgatttataagggattttgccgatttcggcctattggttaaaaaatgagctgatttaacaaaaatttaacgcgaattttaacaaaatattaacgcttacaatttaggtggcacttttcggggaaatgtgcgcggaacccctatttgtttatttttctaaatacattcaaatatgtatccgctcatgagacaataaccctgataaatgcttcaataatattgaaaaaggaagagtatgagtattcaacatttccgtgtcgcccttattcccttttttgcggcattttgccttcctgtttttgctcacccagaaacgctggtgaaagtaaaagatgctgaagatcagttgggtgcacgagtgggttacatcgaactggatctcaacagcggtaagatccttgagagttttcgccccgaagaacgttttccaatgatgagcacttttaaagttctgctatgtggcgcggtattatcccgtattgacgccgggcaagagcaactcggtcgccgcatacactattctcagaatgacttggttgagtactcaccagtcacagaaaagcatcttacggatggcatgacagtaagagaattatgcagtgctgccataaccatgagtgataacactgcggccaacttacttctgacaacgatcggaggaccgaaggagctaaccgcttttttgcacaacatgggggatcatgtaactcgccttgatcgttgggaaccggagctgaatgaagccataccaaacgacgagcgtgacaccacgatgcctgtagcaatggcaacaacgttgcgcaaactattaactggcgaactacttactctagcttcccggcaacaattaatagactggatggaggcggataaagttgcaggaccacttctgcgctcggcccttccggctggctggtttattgctgataaatctggagccggtgagcgtgggtctcgcggtatcattgcagcactggggccagatggtaagccctcccgtatcgtagttatctacacgacggggagtcaggcaactatggatgaacgaaatagacagatcgctgagataggtgcctcactgattaagcattggtaactgtcagaccaagtttactcatatatactttagattgatttaaaacttcatttttaatttaaaaggatctaggtgaagatcctttttgataatctcatgaccaaaatcccttaacgtgagttttcgttccactgagcgtcagaccccgtagaaaagatcaaaggatcttcttgagatcctttttttctgcgcgtaatctgctgcttgcaaacaaaaaaaccaccgctaccagcggtggtttgtttgccggatcaagagctaccaactctttttccgaaggtaactggcttcagcagagcgcagataccaaatactgttcttctagtgtagccgtagttaggccaccacttcaagaactctgtagcaccgcctacatacctcgctctgctaatcctgttaccagtggctgctgccagtggcgataagtcgtgtcttaccgggttggactcaagacgatagttaccggataaggcgcagcggtcgggctgaacggggggttcgtgcacacagcccagcttggagcgaacgacctacaccgaactgagatacctacagcgtgagctatgagaaagcgccacgcttcccgaagggagaaaggcggacaggtatccggtaagcggcagggtcggaacaggagagcgcacgagggagcttccagggggaaacgcctggtatctttatagtcctgtcgggtttcgccacctctgacttgagcgtcgatttttgtgatgctcgtcaggggggcggagcctatggaaaaacgccagcaacgcggcctttttacggttcctggccttttgctggccttttgctcacatgttctttcctgcgttatcccctgattctgtggataaccgtattaccgcctttgagtgagctgataccgctcgccgcagccgaacgaccgagcgcagcgagtcagtgagcgaggaagcggaagagcgcccaatacgcaaaccgcctctccccgcgcgttggccgattcattaatgcagctggcacgacaggtttcccgactggaaagcgggcagtgagcgcaacgcaattaatgtgagttagctcactcattaggcaccccaggctttacactttatgcttccggctcgtatgttgtgtggaattgtgagcggataacaatttcacacaggaaacagctatgaccatgattacgccagatttaattaag

SEQ ID NO: 597 - DNA, 4877 bp, Artificial Sequence
  Description of Artificial Sequence: Synthetic polynucleotide
gccttaattaggctgcgcgctcgctcgctcactgaggccgcccgggcaaagcccgggcgtcgggcgacctttggtcgcccggcctcagtgagcgagcgagcgcgcagagagggagtggccaactccatcactaggggttccttgtagttaatgattaacccgccatgctacttatctaccagggtaatggggatcctctagaactatagctagtcgacattgattattgactagttattaatagtaatcaattacggggtcattagttcatagcccatatatggagttccgcgttacataacttacggtaaatggcccgcctggctgaccgcccaacgacccccgcccattgacgtcaataatgacgtatgttcccatagtaacgccaatagggactttccattgacgtcaatgggtggagtatttacggtaaactgcccacttggcagtacatcaagtgtatcatatgccaagtacgccccctattgacgtcaatgacggtaaatggcccgcctggcattatgcccagtacatgaccttatgggactttcctacttggcagtacatctacgtattagtcatcgctattaccatgtcgaggccacgttctgcttcactctccccatctcccccccctccccacccccaattttgtatttatttattttttaattattttgtgcagcgatgggggcggggggggggggcgcgcgccaggcggggcggggcggggcgaggggcggggcggggcgaggcggagaggtgcggcggcagccaatcagagcggcgcgctccgaaagtttccttttatggcgaggcggcggcggcggcggccctataaaaagcgaagcgcgcggcgggcgggagcaagcttgaactgaaaaaccagaaagttaactggtaagtttagtctttttgtcttttatttcaggtcccggatccggtggtggtgcaaatcaaagaactgctcctcagtggatgttgcctttacttctaggcctgtacggaagtgttacttctgctctaaaagctgcggaattgtacccgcggccgatccaccggtgccgccaccatggctttacttactgcggccgcccggctcttgggaaccaagaatgcatcttgtcttgttcttgcagcccggcatgctagtctgcgcaccgacatcgatgcgacctgcacgccccgccgcgcaagttcgaaccaacgtggcctcaaccagatttggaatgtcaaaaagcagagtgtctatttgatgaatttgaggaaatctggaactttgggccacccaggctctctagatgagaccacctatgaaagactagcagaggaaacgctggactctttagcagagttttttgaagaccttgcagacaagccatacacgtttgaggactatgatgtctcctttgggagtggtgtcttaactgtcaaactgggtggagatctaggaacctatgtgatcaacaagcagacgccaaacaagcaaatctggctatcttctccatccagtggacctaagcgttatgactggactgggaaaaactgggtgttctcccacgacggcgtgtccctccatgagctgctggccgcagagctcactaaagccttaaaaaccaaactggacttgtcttggttggcctattccggaaaagatgcttatccttatgacgtgcctgactatgcctgactcgaggacggggtgaactacgcctgaggatccgatctttttccctctgccaaaaattatggggacatcatgaagccccttgagcatctgacttctggctaataaaggaaatttattttcattgcaatagtgtgttggaattttttgtgtctctcactcggaagcaattcgttgatctgaatttcgaccacccataatacccattaccctggtagataagtagcatggcgggttaatcattaactacaaggaacccctagtgatggagttggccactccctctctgcgcgctcgctcgctcactgaggccgggcgaccaaaggtcgcccgacgcccgggctttgcccgggcggcctcagtgagcgagcgagcgcgcagccttaattaacctaattcactggccgtcgttttacaacgtcgtgactgggaaaaccctggcgttacccaacttaatcgccttgcagcacatccccctttcgccagctggcgtaatagcgaagaggcccgcaccgatcgcccttcccaacagttgcgcagcctgaatggcgaatgggacgcgccctgtagcggcgcattaagcgcggcgggtgtggtggttacgcgcagcgtgaccgctacacttgccagcgccctagcgcccgctcctttcgctttcttcccttcctttctcgccacgttcgccggctttccccgtcaagctctaaatcgggggctccctttagggttccgatttagtgctttacggcacctcgaccccaaaaaacttgattagggtgatggttcacgtagtgggccatcgccctgatagacggtttttcgccctttgacgttggagtccacgttctttaatagtggactcttgttccaaactggaacaacactcaaccctatctcggtctattcttttgatttataagggattttgccgatttcggcctattggttaaaaaatgagctgatttaacaaaaatttaacgcgaattttaacaaaatattaacgcttacaatttaggtggcacttttcggggaaatgtgcgcggaacccctatttgtttatttttctaaatacattcaaatatgtatccgctcatgagacaataaccctgataaatgcttcaataatattgaaaaaggaagagtatgagtattcaacatttccgtgtcgcccttattcccttttttgcggcattttgccttcctgtttttgctcacccagaaacgctggtgaaagtaaaagatgctgaagatcagttgggtgcacgagtgggttacatcgaactggatctcaacagcggtaagatccttgagagttttcgccccgaagaacgttttccaatgatgagcacttttaaagttctgctatgtggcgcggtattatcccgtattgacgccgggcaagagcaactcggtcgccgcatacactattctcagaatgacttggttgagtactcaccagtcacagaaaagcatcttacggatggcatgacagtaagagaattatgcagtgctgccataaccatgagtgataacactgcggccaacttacttctgacaacgatcggaggaccgaaggagctaaccgcttttttgcacaacatgggggatcatgtaactcgccttgatcgttgggaaccggagctgaatgaagccataccaaacgacgagcgtgacaccacgatgcctgtagcaatggcaacaacgttgcgcaaactattaactggcgaactacttactctagcttcccggcaacaattaatagactggatggaggcggataaagttgcaggaccacttctgcgctcggcccttccggctggctggtttattgctgataaatctggagccggtgagcgtgggtctcgcggtatcattgcagcactggggccagatggtaagccctcccgtatcgtagttatctacacgacggggagtcaggcaactatggatgaacgaaatagacagatcgctgagataggtgcctcactgattaagcattggtaactgtcagaccaagtttactcatatatactttagattgatttaaaacttcatttttaatttaaaaggatctaggtgaagatcctttttgataatctcatgaccaaaatcccttaacgtgagttttcgttccactgagcgtcagaccccgtagaaaagatcaaaggatcttcttgagatcctttttttctgcgcgtaatctgctgcttgcaaacaaaaaaaccaccgctaccagcggtggtttgtttgccggatcaagagctaccaactctttttccgaaggtaactggcttcagcagagcgcagataccaaatactgttcttctagtgtagccgtagttaggccaccacttcaagaactctgtagcaccgcctacatacctcgctctgctaatcctgttaccagtggctgctgccagtggcgataagtcgtgtcttaccgggttggactcaagacgatagttaccggataaggcgcagcggtcgggctgaacggggggttcgtgcacacagcccagcttggagcgaacgacctacaccgaactgagatacctacagcgtgagctatgagaaagcgccacgcttcccgaagggagaaaggcggacaggtatccggtaagcggcagggtcggaacaggagagcgcacgagggagcttccagggggaaacgcctggtatctttatagtcctgtcgggtttcgccacctctgacttgagcgtcgatttttgtgatgctcgtcaggggggcggagcctatggaaaaacgccagcaacgcggcctttttacggttcctggccttttgctggccttttgctcacatgttctttcctgcgttatcccctgattctgtggataaccgtattaccgcctttgagtgagctgataccgctcgccgcagccgaacgaccgagcgcagcgagtcagtgagcgaggaagcggaagagcgcccaatacgcaaaccgcctctccccgcgcgttggccgattcattaatgcagctggcacgacaggtttcccgactggaaagcgggcagtgagcgcaacgcaattaatgtgagttagctcactcattaggcaccccaggctttacactttatgcttccggctcgtatgttgtgtggaattgtgagcggataacaatttcacacaggaaacagctatgaccatgattacgccagatttaattaag

SEQ ID NO: 598 - DNA, 4892 bp, Artificial Sequence
  Description of Artificial Sequence: Synthetic polynucleotide
gccttaattaggctgcgcgctcgctcgctcactgaggccgcccgggcaaagcccgggcgtcgggcgacctttggtcgcccggcctcagtgagcgagcgagcgcgcagagagggagtggccaactccatcactaggggttccttgtagttaatgattaacccgccatgctacttatctaccagggtaatggggatcctctagaactatagctagtcgacattgattattgactagttattaatagtaatcaattacggggtcattagttcatagcccatatatggagttccgcgttacataacttacggtaaatggcccgcctggctgaccgcccaacgacccccgcccattgacgtcaataatgacgtatgttcccatagtaacgccaatagggactttccattgacgtcaatgggtggagtatttacggtaaactgcccacttggcagtacatcaagtgtatcatatgccaagtacgccccctattgacgtcaatgacggtaaatggcccgcctggcattatgcccagtacatgaccttatgggactttcctacttggcagtacatctacgtattagtcatcgctattaccatgtcgaggccacgttctgcttcactctccccatctcccccccctccccacccccaattttgtatttatttattttttaattattttgtgcagcgatgggggcggggggggggggcgcgcgccaggcggggcggggcggggcgaggggcggggcggggcgaggcggagaggtgcggcggcagccaatcagagcggcgcgctccgaaagtttccttttatggcgaggcggcggcggcggcggccctataaaaagcgaagcgcgcggcgggcgggagcaagcttgaactgaaaaaccagaaagttaactggtaagtttagtctttttgtcttttatttcaggtcccggatccggtggtggtgcaaatcaaagaactgctcctcagtggatgttgcctttacttctaggcctgtacggaagtgttacttctgctctaaaagctgcggaattgtacccgcggccgatccaccggtgccgccaccatgtggactctcgggcgccgcgcagtagccggcctcctggcgtcacccagcccggcccaggcccagaccctcacccgggtcccgcggccggcagagttggccccactctgcggccgccgtggcctgcgcaccgacatcgatgcgacctgcacgccccgccgcgcaagttcgaaccaacgtggcctcaaccagatttggaatgtcaaaaagcagagtgtctatttgatgaatttgaggaaatctggaactttgggccacccaggctctctagatgagaccacctatgaaagactagcagaggaaacgctggactctttagcagagttttttgaagaccttgcagacaagccatacacgtttgaggactatgatgtctcctttgggagtggtgtcttaactgtcaaactgggtggagatctaggaacctatgtgatcaacaagcagacgccaaacaagcaaatctggctatcttctccatccagtggacctaagcgttatgactggactgggaaaaactgggtgttctcccacgacggcgtgtccctccatgagctgctggccgcagagctcactaaagccttaaaaaccaaactggacttgtcttggttggcctattccggaaaagatgcttgactcgaggacggggtgaactacgcctgaggatccgatctttttccctctgccaaaaattatggggacatcatgaagccccttgagcatctgacttctggctaataaaggaaatttattttcattgcaatagtgtgttggaattttttgtgtctctcactcggaagcaattcgttgatctgaatttcgaccacccataatacccattaccctggtagataagtagcatggcgggttaatcattaactacaaggaacccctagtgatggagttggccactccctctctgcgcgctcgctcgctcactgaggccgggcgaccaaaggtcgcccgacgcccgggctttgcccgggcggcctcagtgagcgagcgagcgcgcagccttaattaacctaattcactggccgtcgttttacaacgtcgtgactgggaaaaccctggcgttacccaacttaatcgccttgcagcacatccccctttcgccagctggcgtaatagcgaagaggcccgcaccgatcgcccttcccaacagttgcgcagcctgaatggcgaatgggacgcgccctgtagcggcgcattaagcgcggcgggtgtggtggttacgcgcagcgtgaccgctacacttgccagcgccctagcgcccgctcctttcgctttcttcccttcctttctcgccacgttcgccggctttccccgtcaagctctaaatcgggggctccctttagggttccgatttagtgctttacggcacctcgaccccaaaaaacttgattagggtgatggttcacgtagtgggccatcgccctgatagacggtttttcgccctttgacgttggagtccacgttctttaatagtggactcttgttccaaactggaacaacactcaaccctatctcggtctattcttttgatttataagggattttgccgatttcggcctattggttaaaaaatgagctgatttaacaaaaatttaacgcgaattttaacaaaatattaacgcttacaatttaggtggcacttttcggggaaatgtgcgcggaacccctatttgtttatttttctaaatacattcaaatatgtatccgctcatgagacaataaccctgataaatgcttcaataatattgaaaaaggaagagtatgagtattcaacatttccgtgtcgcccttattcccttttttgcggcattttgccttcctgtttttgctcacccagaaacgctggtgaaagtaaaagatgctgaagatcagttgggtgcacgagtgggttacatcgaactggatctcaacagcggtaagatccttgagagttttcgccccgaagaacgttttccaatgatgagcacttttaaagttctgctatgtggcgcggtattatcccgtattgacgccgggcaagagcaactcggtcgccgcatacactattctcagaatgacttggttgagtactcaccagtcacagaaaagcatcttacggatggcatgacagtaagagaattatgcagtgctgccataaccatgagtgataacactgcggccaacttacttctgacaacgatcggaggaccgaaggagctaaccgcttttttgcacaacatgggggatcatgtaactcgccttgatcgttgggaaccggagctgaatgaagccataccaaacgacgagcgtgacaccacgatgcctgtagcaatggcaacaacgttgcgcaaactattaactggcgaactacttactctagcttcccggcaacaattaatagactggatggaggcggataaagttgcaggaccacttctgcgctcggcccttccggctggctggtttattgctgataaatctggagccggtgagcgtgggtctcgcggtatcattgcagcactggggccagatggtaagccctcccgtatcgtagttatctacacgacggggagtcaggcaactatggatgaacgaaatagacagatcgctgagataggtgcctcactgattaagcattggtaactgtcagaccaagtttactcatatatactttagattgatttaaaacttcatttttaatttaaaaggatctaggtgaagatcctttttgataatctcatgaccaaaatcccttaacgtgagttttcgttccactgagcgtcagaccccgtagaaaagatcaaaggatcttcttgagatcctttttttctgcgcgtaatctgctgcttgcaaacaaaaaaaccaccgctaccagcggtggtttgtttgccggatcaagagctaccaactctttttccgaaggtaactggcttcagcagagcgcagataccaaatactgttcttctagtgtagccgtagttaggccaccacttcaagaactctgtagcaccgcctacatacctcgctctgctaatcctgttaccagtggctgctgccagtggcgataagtcgtgtcttaccgggttggactcaagacgatagttaccggataaggcgcagcggtcgggctgaacggggggttcgtgcacacagcccagcttggagcgaacgacctacaccgaactgagatacctacagcgtgagctatgagaaagcgccacgcttcccgaagggagaaaggcggacaggtatccggtaagcggcagggtcggaacaggagagcgcacgagggagcttccagggggaaacgcctggtatctttatagtcctgtcgggtttcgccacctctgacttgagcgtcgatttttgtgatgctcgtcaggggggcggagcctatggaaaaacgccagcaacgcggcctttttacggttcctggccttttgctggccttttgctcacatgttctttcctgcgttatcccctgattctgtggataaccgtattaccgcctttgagtgagctgataccgctcgccgcagccgaacgaccgagcgcagcgagtcagtgagcgaggaagcggaagagcgcccaatacgcaaaccgcctctccccgcgcgttggccgattcattaatgcagctggcacgacaggtttcccgactggaaagcgggcagtgagcgcaacgcaattaatgtgagttagctcactcattaggcaccccaggctttacactttatgcttccggctcgtatgttgtgtggaattgtgagcggataacaatttcacacaggaaacagctatgaccatgattacgccagatttaattaag

SEQ ID NO: 599 - DNA, 4850 bp, Artificial Sequence
  Description of Artificial Sequence: Synthetic polynucleotide
gccttaattaggctgcgcgctcgctcgctcactgaggccgcccgggcaaagcccgggcgtcgggcgacctttggtcgcccggcctcagtgagcgagcgagcgcgcagagagggagtggccaactccatcactaggggttccttgtagttaatgattaacccgccatgctacttatctaccagggtaatggggatcctctagaactatagctagtcgacattgattattgactagttattaatagtaatcaattacggggtcattagttcatagcccatatatggagttccgcgttacataacttacggtaaatggcccgcctggctgaccgcccaacgacccccgcccattgacgtcaataatgacgtatgttcccatagtaacgccaatagggactttccattgacgtcaatgggtggagtatttacggtaaactgcccacttggcagtacatcaagtgtatcatatgccaagtacgccccctattgacgtcaatgacggtaaatggcccgcctggcattatgcccagtacatgaccttatgggactttcctacttggcagtacatctacgtattagtcatcgctattaccatgtcgaggccacgttctgcttcactctccccatctcccccccctccccacccccaattttgtatttatttattttttaattattttgtgcagcgatgggggcggggggggggggcgcgcgccaggcggggcggggcggggcgaggggcggggcggggcgaggcggagaggtgcggcggcagccaatcagagcggcgcgctccgaaagtttccttttatggcgaggcggcggcggcggcggccctataaaaagcgaagcgcgcggcgggcgggagcaagcttgaactgaaaaaccagaaagttaactggtaagtttagtctttttgtcttttatttcaggtcccggatccggtggtggtgcaaatcaaagaactgctcctcagtggatgttgcctttacttctaggcctgtacggaagtgttacttctgctctaaaagctgcggaattgtacccgcggccgatccaccggtgccgccaccatggctttacttactgcggccgcccggctcttgggaaccaagaatgcatcttgtcttgttcttgcagcccggcatgctagtctgcgaacagatatagacgcaacgtgcacccccagaagagcaagcagcaaccagagaggcctcaatcagatttggaacgtcaagaaacagagtgtctatctgatgaacctccgcaaatcagggacccttggtcatccgggatctcttgatgaaacgacctatgaacggctggctgaggagacgcttgactccctggcagagttcttcgaggatctggctgataagccatacacgttcgaggactatgatgtttcttttggttctggcgtcctgacggtgaaactcggaggggatctgggcacttacgttatcaacaaacagactcccaataaacagatttggttgtctagtcctagcagtggcccaaaacgctatgactggacgggcaagaactgggtgtactcccacgatggagttagcctgcacgaacttctggccgctgagcttactaaagcgctgaagactaagctggatctctccagcctcgcatacagcggcaaagacgcctagctcgaggacggggtgaactacgcctgaggatccgatctttttccctctgccaaaaattatggggacatcatgaagccccttgagcatctgacttctggctaataaaggaaatttattttcattgcaatagtgtgttggaattttttgtgtctctcactcggaagcaattcgttgatctgaatttcgaccacccataatacccattaccctggtagataagtagcatggcgggttaatcattaactacaaggaacccctagtgatggagttggccactccctctctgcgcgctcgctcgctcactgaggccgggcgaccaaaggtcgcccgacgcccgggctttgcccgggcggcctcagtgagcgagcgagcgcgcagccttaattaacctaattcactggccgtcgttttacaacgtcgtgactgggaaaaccctggcgttacccaacttaatcgccttgcagcacatccccctttcgccagctggcgtaatagcgaagaggcccgcaccgatcgcccttcccaacagttgcgcagcctgaatggcgaatgggacgcgccctgtagcggcgcattaagcgcggcgggtgtggtggttacgcgcagcgtgaccgctacacttgccagcgccctagcgcccgctcctttcgctttcttcccttcctttctcgccacgttcgccggctttccccgtcaagctctaaatcgggggctccctttagggttccgatttagtgctttacggcacctcgaccccaaaaaacttgattagggtgatggttcacgtagtgggccatcgccctgatagacggtttttcgccctttgacgttggagtccacgttctttaatagtggactcttgttccaaactggaacaacactcaaccctatctcggtctattcttttgatttataagggattttgccgatttcggcctattggttaaaaaatgagctgatttaacaaaaatttaacgcgaattttaacaaaatattaacgcttacaatttaggtggcacttttcggggaaatgtgcgcggaacccctatttgtttatttttctaaatacattcaaatatgtatccgctcatgagacaataaccctgataaatgcttcaataatattgaaaaaggaagagtatgagtattcaacatttccgtgtcgcccttattcccttttttgcggcattttgccttcctgtttttgctcacccagaaacgctggtgaaagtaaaagatgctgaagatcagttgggtgcacgagtgggttacatcgaactggatctcaacagcggtaagatccttgagagttttcgccccgaagaacgttttccaatgatgagcacttttaaagttctgctatgtggcgcggtattatcccgtattgacgccgggcaagagcaactcggtcgccgcatacactattctcagaatgacttggttgagtactcaccagtcacagaaaagcatcttacggatggcatgacagtaagagaattatgcagtgctgccataaccatgagtgataacactgcggccaacttacttctgacaacgatcggaggaccgaaggagctaaccgcttttttgcacaacatgggggatcatgtaactcgccttgatcgttgggaaccggagctgaatgaagccataccaaacgacgagcgtgacaccacgatgcctgtagcaatggcaacaacgttgcgcaaactattaactggcgaactacttactctagcttcccggcaacaattaatagactggatggaggcggataaagttgcaggaccacttctgcgctcggcccttccggctggctggtttattgctgataaatctggagccggtgagcgtgggtctcgcggtatcattgcagcactggggccagatggtaagccctcccgtatcgtagttatctacacgacggggagtcaggcaactatggatgaacgaaatagacagatcgctgagataggtgcctcactgattaagcattggtaactgtcagaccaagtttactcatatatactttagattgatttaaaacttcatttttaatttaaaaggatctaggtgaagatcctttttgataatctcatgaccaaaatcccttaacgtgagttttcgttccactgagcgtcagaccccgtagaaaagatcaaaggatcttcttgagatcctttttttctgcgcgtaatctgctgcttgcaaacaaaaaaaccaccgctaccagcggtggtttgtttgccggatcaagagctaccaactctttttccgaaggtaactggcttcagcagagcgcagataccaaatactgttcttctagtgtagccgtagttaggccaccacttcaagaactctgtagcaccgcctacatacctcgctctgctaatcctgttaccagtggctgctgccagtggcgataagtcgtgtcttaccgggttggactcaagacgatagttaccggataaggcgcagcggtcgggctgaacggggggttcgtgcacacagcccagcttggagcgaacgacctacaccgaactgagatacctacagcgtgagctatgagaaagcgccacgcttcccgaagggagaaaggcggacaggtatccggtaagcggcagggtcggaacaggagagcgcacgagggagcttccagggggaaacgcctggtatctttatagtcctgtcgggtttcgccacctctgacttgagcgtcgatttttgtgatgctcgtcaggggggcggagcctatggaaaaacgccagcaacgcggcctttttacggttcctggccttttgctggccttttgctcacatgttctttcctgcgttatcccctgattctgtggataaccgtattaccgcctttgagtgagctgataccgctcgccgcagccgaacgaccgagcgcagcgagtcagtgagcgaggaagcggaagagcgcccaatacgcaaaccgcctctccccgcgcgttggccgattcattaatgcagctggcacgacaggtttcccgactggaaagcgggcagtgagcgcaacgcaattaatgtgagttagctcactcattaggcaccccaggctttacactttatgcttccggctcgtatgttgtgtggaattgtgagcggataacaatttcacacaggaaacagctatgaccatgattacgccagatttaattaag

SEQ ID NO: 600 - DNA, 4892 bp, Artificial Sequence
  Description of Artificial Sequence: Synthetic polynucleotide
gccttaattaggctgcgcgctcgctcgctcactgaggccgcccgggcaaagcccgggcgtcgggcgacctttggtcgcccggcctcagtgagcgagcgagcgcgcagagagggagtggccaactccatcactaggggttccttgtagttaatgattaacccgccatgctacttatctaccagggtaatggggatcctctagaactatagctagtcgacattgattattgactagttattaatagtaatcaattacggggtcattagttcatagcccatatatggagttccgcgttacataacttacggtaaatggcccgcctggctgaccgcccaacgacccccgcccattgacgtcaataatgacgtatgttcccatagtaacgccaatagggactttccattgacgtcaatgggtggagtatttacggtaaactgcccacttggcagtacatcaagtgtatcatatgccaagtacgccccctattgacgtcaatgacggtaaatggcccgcctggcattatgcccagtacatgaccttatgggactttcctacttggcagtacatctacgtattagtcatcgctattaccatgtcgaggccacgttctgcttcactctccccatctcccccccctccccacccccaattttgtatttatttattttttaattattttgtgcagcgatgggggcggggggggggggcgcgcgccaggcggggcggggcggggcgaggggcggggcggggcgaggcggagaggtgcggcggcagccaatcagagcggcgcgctccgaaagtttccttttatggcgaggcggcggcggcggcggccctataaaaagcgaagcgcgcggcgggcgggagcaagcttgaactgaaaaaccagaaagttaactggtaagtttagtctttttgtcttttatttcaggtcccggatccggtggtggtgcaaatcaaagaactgctcctcagtggatgttgcctttacttctaggcctgtacggaagtgttacttctgctctaaaagctgcggaattgtacccgcggccgatccaccggtgccgccaccatgtggactctcgggcgacgcgccgtagccggtctcctggcttccccaagccctgcacaggcacagaccctcacacgggtcccacggccagctgaattggccccactctgcggtcgccggggcctgcgaaccgatatagacgcaacgtgcactccccgacgagcaagttccaaccagagagggctcaaccagatttggaacgtcaagaagcagagtgtctatttgatgaatctgagaaaatccgggacccttgggcaccccggatctcttgatgaaactacctatgaaaggctggccgaggagacgctggactctctggcagagttcttcgaggatctggcagacaagccatacacgtttgaggactatgatgtctcttttggatctggcgtcctgacggttaaactgggaggggatctcggaacctacgttatcaacaaacagactcccaataagcagatctggttgtctagtccatccagtggtcctaaacgctatgactggacgggcaagaactgggtgtactcccacgacggagttagccttcatgaactgctggccgcagagctgactaaagctcttaagactaaactggatctctctagcctggcctactccgggaaagatgcctagctcgaggacggggtgaactacgcctgaggatccgatctttttccctctgccaaaaattatggggacatcatgaagccccttgagcatctgacttctggctaataaaggaaatttattttcattgcaatagtgtgttggaattttttgtgtctctcactcggaagcaattcgttgatctgaatttcgaccacccataatacccattaccctggtagataagtagcatggcgggttaatcattaactacaaggaacccctagtgatggagttggccactccctctctgcgcgctcgctcgctcactgaggccgggcgaccaaaggtcgcccgacgcccgggctttgcccgggcggcctcagtgagcgagcgagcgcgcagccttaattaacctaattcactggccgtcgttttacaacgtcgtgactgggaaaaccctggcgttacccaacttaatcgccttgcagcacatccccctttcgccagctggcgtaatagcgaagaggcccgcaccgatcgcccttcccaacagttgcgcagcctgaatggcgaatgggacgcgccctgtagcggcgcattaagcgcggcgggtgtggtggttacgcgcagcgtgaccgctacacttgccagcgccctagcgcccgctcctttcgctttcttcccttcctttctcgccacgttcgccggctttccccgtcaagctctaaatcgggggctccctttagggttccgatttagtgctttacggcacctcgaccccaaaaaacttgattagggtgatggttcacgtagtgggccatcgccctgatagacggtttttcgccctttgacgttggagtccacgttctttaatagtggactcttgttccaaactggaacaacactcaaccctatctcggtctattcttttgatttataagggattttgccgatttcggcctattggttaaaaaatgagctgatttaacaaaaatttaacgcgaattttaacaaaatattaacgcttacaatttaggtggcacttttcggggaaatgtgcgcggaacccctatttgtttatttttctaaatacattcaaatatgtatccgctcatgagacaataaccctgataaatgcttcaataatattgaaaaaggaagagtatgagtattcaacatttccgtgtcgcccttattcccttttttgcggcattttgccttcctgtttttgctcacccagaaacgctggtgaaagtaaaagatgctgaagatcagttgggtgcacgagtgggttacatcgaactggatctcaacagcggtaagatccttgagagttttcgccccgaagaacgttttccaatgatgagcacttttaaagttctgctatgtggcgcggtattatcccgtattgacgccgggcaagagcaactcggtcgccgcatacactattctcagaatgacttggttgagtactcaccagtcacagaaaagcatcttacggatggcatgacagtaagagaattatgcagtgctgccataaccatgagtgataacactgcggccaacttacttctgacaacgatcggaggaccgaaggagctaaccgcttttttgcacaacatgggggatcatgtaactcgccttgatcgttgggaaccggagctgaatgaagccataccaaacgacgagcgtgacaccacgatgcctgtagcaatggcaacaacgttgcgcaaactattaactggcgaactacttactctagcttcccggcaacaattaatagactggatggaggcggataaagttgcaggaccacttctgcgctcggcccttccggctggctggtttattgctgataaatctggagccggtgagcgtgggtctcgcggtatcattgcagcactggggccagatggtaagccctcccgtatcgtagttatctacacgacggggagtcaggcaactatggatgaacgaaatagacagatcgctgagataggtgcctcactgattaagcattggtaactgtcagaccaagtttactcatatatactttagattgatttaaaacttcatttttaatttaaaaggatctaggtgaagatcctttttgataatctcatgaccaaaatcccttaacgtgagttttcgttccactgagcgtcagaccccgtagaaaagatcaaaggatcttcttgagatcctttttttctgcgcgtaatctgctgcttgcaaacaaaaaaaccaccgctaccagcggtggtttgtttgccggatcaagagctaccaactctttttccgaaggtaactggcttcagcagagcgcagataccaaatactgttcttctagtgtagccgtagttaggccaccacttcaagaactctgtagcaccgcctacatacctcgctctgctaatcctgttaccagtggctgctgccagtggcgataagtcgtgtcttaccgggttggactcaagacgatagttaccggataaggcgcagcggtcgggctgaacggggggttcgtgcacacagcccagcttggagcgaacgacctacaccgaactgagatacctacagcgtgagctatgagaaagcgccacgcttcccgaagggagaaaggcggacaggtatccggtaagcggcagggtcggaacaggagagcgcacgagggagcttccagggggaaacgcctggtatctttatagtcctgtcgggtttcgccacctctgacttgagcgtcgatttttgtgatgctcgtcaggggggcggagcctatggaaaaacgccagcaacgcggcctttttacggttcctggccttttgctggccttttgctcacatgttctttcctgcgttatcccctgattctgtggataaccgtattaccgcctttgagtgagctgataccgctcgccgcagccgaacgaccgagcgcagcgagtcagtgagcgaggaagcggaagagcgcccaatacgcaaaccgcctctccccgcgcgttggccgattcattaatgcagctggcacgacaggtttcccgactggaaagcgggcagtgagcgcaacgcaattaatgtgagttagctcactcattaggcaccccaggctttacactttatgcttccggctcgtatgttgtgtggaattgtgagcggataacaatttcacacaggaaacagctatgaccatgattacgccagatttaattaag

SEQ ID NO: 601 - DNA, 4892 bp, Artificial Sequence
  Description of Artificial Sequence: Synthetic polynucleotide
gccttaattaggctgcgcgctcgctcgctcactgaggccgcccgggcaaagcccgggcgtcgggcgacctttggtcgcccggcctcagtgagcgagcgagcgcgcagagagggagtggccaactccatcactaggggttccttgtagttaatgattaacccgccatgctacttatctaccagggtaatggggatcctctagaactatagctagtcgacattgattattgactagttattaatagtaatcaattacggggtcattagttcatagcccatatatggagttccgcgttacataacttacggtaaatggcccgcctggctgaccgcccaacgacccccgcccattgacgtcaataatgacgtatgttcccatagtaacgccaatagggactttccattgacgtcaatgggtggagtatttacggtaaactgcccacttggcagtacatcaagtgtatcatatgccaagtacgccccctattgacgtcaatgacggtaaatggcccgcctggcattatgcccagtacatgaccttatgggactttcctacttggcagtacatctacgtattagtcatcgctattaccatgtcgaggccacgttctgcttcactctccccatctcccccccctccccacccccaattttgtatttatttattttttaattattttgtgcagcgatgggggcggggggggggggcgcgcgccaggcggggcggggcggggcgaggggcggggcggggcgaggcggagaggtgcggcggcagccaatcagagcggcgcgctccgaaagtttccttttatggcgaggcggcggcggcggcggccctataaaaagcgaagcgcgcggcgggcgggagcaagcttgaactgaaaaaccagaaagttaactggtaagtttagtctttttgtcttttatttcaggtcccggatccggtggtggtgcaaatcaaagaactgctcctcagtggatgttgcctttacttctaggcctgtacggaagtgttacttctgctctaaaagctgcggaattgtacccgcggccgatccaccggtgccgccaccatgtggactctggggcgacgcgccgtggccgggctcctggcatccccatcccctgcgcaggcgcaaaccctcacacgggttccacggccagctgaactggccccactgtgcggccggcggggcctgagaacagatattgacgcaacgtgcactcccagaagagccagcagcaaccagagggggttgaatcagatctggaacgtcaagaagcagtcagtgtacctgatgaatctccgaaaaagcgggacccttggtcaccccggatctctcgatgaaaccacatatgaacggctggccgaggaaacgctggactccctggccgagttcttcgaggacctggcagacaagccgtacaccttcgaagactatgatgtttcattcggaagtggcgtgctgacggtcaaactgggaggcgatctgggaacctacgttataaacaaacagactcccaataaacagatctggttgtctagtccatccagcggtcctaaacgctatgactggacgggcaagaactgggtctactcccacgacggagttagccttcacgaactgttggccgcagagctgacaaaggcgcttaagacgaaactggatctctctagcctggcctactccggcaaagatgcctagctcgaggacggggtgaactacgcctgaggatccgatctttttccctctgccaaaaattatggggacatcatgaagccccttgagcatctgacttctggctaataaaggaaatttattttcattgcaatagtgtgttggaattttttgtgtctctcactcggaagcaattcgttgatctgaatttcgaccacccataatacccattaccctggtagataagtagcatggcgggttaatcattaactacaaggaacccctagtgatggagttggccactccctctctgcgcgctcgctcgctcactgaggccgggcgaccaaaggtcgcccgacgcccgggctttgcccgggcggcctcagtgagcgagcgagcgcgcagccttaattaacctaattcactggccgtcgttttacaacgtcgtgactgggaaaaccctggcgttacccaacttaatcgccttgcagcacatccccctttcgccagctggcgtaatagcgaagaggcccgcaccgatcgcccttcccaacagttgcgcagcctgaatggcgaatgggacgcgccctgtagcggcgcattaagcgcggcgggtgtggtggttacgcgcagcgtgaccgctacacttgccagcgccctagcgcccgctcctttcgctttcttcccttcctttctcgccacgttcgccggctttccccgtcaagctctaaatcgggggctccctttagggttccgatttagtgctttacggcacctcgaccccaaaaaacttgattagggtgatggttcacgtagtgggccatcgccctgatagacggtttttcgccctttgacgttggagtccacgttctttaatagtggactcttgttccaaactggaacaacactcaaccctatctcggtctattcttttgatttataagggattttgccgatttcggcctattggttaaaaaatgagctgatttaacaaaaatttaacgcgaattttaacaaaatattaacgcttacaatttaggtggcacttttcggggaaatgtgcgcggaacccctatttgtttatttttctaaatacattcaaatatgtatccgctcatgagacaataaccctgataaatgcttcaataatattgaaaaaggaagagtatgagtattcaacatttccgtgtcgcccttattcccttttttgcggcattttgccttcctgtttttgctcacccagaaacgctggtgaaagtaaaagatgctgaagatcagttgggtgcacgagtgggttacatcgaactggatctcaacagcggtaagatccttgagagttttcgccccgaagaacgttttccaatgatgagcacttttaaagttctgctatgtggcgcggtattatcccgtattgacgccgggcaagagcaactcggtcgccgcatacactattctcagaatgacttggttgagtactcaccagtcacagaaaagcatcttacggatggcatgacagtaagagaattatgcagtgctgccataaccatgagtgataacactgcggccaacttacttctgacaacgatcggaggaccgaaggagctaaccgcttttttgcacaacatgggggatcatgtaactcgccttgatcgttgggaaccggagctgaatgaagccataccaaacgacgagcgtgacaccacgatgcctgtagcaatggcaacaacgttgcgcaaactattaactggcgaactacttactctagcttcccggcaacaattaatagactggatggaggcggataaagttgcaggaccacttctgcgctcggcccttccggctggctggtttattgctgataaatctggagccggtgagcgtgggtctcgcggtatcattgcagcactggggccagatggtaagccctcccgtatcgtagttatctacacgacggggagtcaggcaactatggatgaacgaaatagacagatcgctgagataggtgcctcactgattaagcattggtaactgtcagaccaagtttactcatatatactttagattgatttaaaacttcatttttaatttaaaaggatctaggtgaagatcctttttgataatctcatgaccaaaatcccttaacgtgagttttcgttccactgagcgtcagaccccgtagaaaagatcaaaggatcttcttgagatcctttttttctgcgcgtaatctgctgcttgcaaacaaaaaaaccaccgctaccagcggtggtttgtttgccggatcaagagctaccaactctttttccgaaggtaactggcttcagcagagcgcagataccaaatactgttcttctagtgtagccgtagttaggccaccacttcaagaactctgtagcaccgcctacatacctcgctctgctaatcctgttaccagtggctgctgccagtggcgataagtcgtgtcttaccgggttggactcaagacgatagttaccggataaggcgcagcggtcgggctgaacggggggttcgtgcacacagcccagcttggagcgaacgacctacaccgaactgagatacctacagcgtgagctatgagaaagcgccacgcttcccgaagggagaaaggcggacaggtatccggtaagcggcagggtcggaacaggagagcgcacgagggagcttccagggggaaacgcctggtatctttatagtcctgtcgggtttcgccacctctgacttgagcgtcgatttttgtgatgctcgtcaggggggcggagcctatggaaaaacgccagcaacgcggcctttttacggttcctggccttttgctggccttttgctcacatgttctttcctgcgttatcccctgattctgtggataaccgtattaccgcctttgagtgagctgataccgctcgccgcagccgaacgaccgagcgcagcgagtcagtgagcgaggaagcggaagagcgcccaatacgcaaaccgcctctccccgcgcgttggccgattcattaatgcagctggcacgacaggtttcccgactggaaagcgggcagtgagcgcaacgcaattaatgtgagttagctcactcattaggcaccccaggctttacactttatgcttccggctcgtatgttgtgtggaattgtgagcggataacaatttcacacaggaaacagctatgaccatgattacgccagatttaattaag

SEQ ID NO: 602 - DNA, 4892 bp, Artificial Sequence
  Description of Artificial Sequence: Synthetic polynucleotide
gccttaattaggctgcgcgctcgctcgctcactgaggccgcccgggcaaagcccgggcgtcgggcgacctttggtcgcccggcctcagtgagcgagcgagcgcgcagagagggagtggccaactccatcactaggggttccttgtagttaatgattaacccgccatgctacttatctaccagggtaatggggatcctctagaactatagctagtcgacattgattattgactagttattaatagtaatcaattacggggtcattagttcatagcccatatatggagttccgcgttacataacttacggtaaatggcccgcctggctgaccgcccaacgacccccgcccattgacgtcaataatgacgtatgttcccatagtaacgccaatagggactttccattgacgtcaatgggtggagtatttacggtaaactgcccacttggcagtacatcaagtgtatcatatgccaagtacgccccctattgacgtcaatgacggtaaatggcccgcctggcattatgcccagtacatgaccttatgggactttcctacttggcagtacatctacgtattagtcatcgctattaccatgtcgaggccacgttctgcttcactctccccatctcccccccctccccacccccaattttgtatttatttattttttaattattttgtgcagcgatgggggcggggggggggggcgcgcgccaggcggggcggggcggggcgaggggcggggcggggcgaggcggagaggtgcggcggcagccaatcagagcggcgcgctccgaaagtttccttttatggcgaggcggcggcggcggcggccctataaaaagcgaagcgcgcggcgggcgggagcaagcttgaactgaaaaaccagaaagttaactggtaagtttagtctttttgtcttttatttcaggtcccggatccggtggtggtgcaaatcaaagaactgctcctcagtggatgttgcctttacttctaggcctgtacggaagtgttacttctgctctaaaagctgcggaattgtacccgcggccgatccaccggtgccgccaccatgtggacactggggaggagggccgtcgctgggctgctggcttcaccatcacccgctcaggctcagaccctgacaagagtgccaaggccagcagagctggccccactgtgcgggcggagaggactgcgaaccgacatcgatgctacttgtaccccaaggcgagcaagctccaaccagcgagggctgaaccagatttggaatgtgaagaaacagtctgtctacctgatgaatctgagaaagagcggcactctgggacaccctggcagcctggacgagaccacctacgagcggctggccgaggaaaccctggattccctggccgagttctttgaagacctggctgataagccatacaccttcgaagactatgacgtgagcttcggcagcggcgtgctgacagtcaaactgggcggggacctgggaacatacgtgatcaacaagcagactcctaacaagcagatttggctgtctagtccctcaagcggccctaagaggtatgactggacagggaaaaactgggtgtatagtcacgatggcgtctcactgcatgagctgctggccgctgaactgactaaggcactgaaaactaaactggacctgagctccctggcttactctgggaaagacgcataactcgaggacggggtgaactacgcctgaggatccgatctttttccctctgccaaaaattatggggacatcatgaagccccttgagcatctgacttctggctaataaaggaaatttattttcattgcaatagtgtgttggaattttttgtgtctctcactcggaagcaattcgttgatctgaatttcgaccacccataatacccattaccctggtagataagtagcatggcgggttaatcattaactacaaggaacccctagtgatggagttggccactccctctctgcgcgctcgctcgctcactgaggccgggcgaccaaaggtcgcccgacgcccgggctttgcccgggcggcctcagtgagcgagcgagcgcgcagccttaattaacctaattcactggccgtcgttttacaacgtcgtgactgggaaaaccctggcgttacccaacttaatcgccttgcagcacatccccctttcgccagctggcgtaatagcgaagaggcccgcaccgatcgcccttcccaacagttgcgcagcctgaatggcgaatgggacgcgccctgtagcggcgcattaagcgcggcgggtgtggtggttacgcgcagcgtgaccgctacacttgccagcgccctagcgcccgctcctttcgctttcttcccttcctttctcgccacgttcgccggctttccccgtcaagctctaaatcgggggctccctttagggttccgatttagtgctttacggcacctcgaccccaaaaaacttgattagggtgatggttcacgtagtgggccatcgccctgatagacggtttttcgccctttgacgttggagtccacgttctttaatagtggactcttgttccaaactggaacaacactcaaccctatctcggtctattcttttgatttataagggattttgccgatttcggcctattggttaaaaaatgagctgatttaacaaaaatttaacgcgaattttaacaaaatattaacgcttacaatttaggtggcacttttcggggaaatgtgcgcggaacccctatttgtttatttttctaaatacattcaaatatgtatccgctcatgagacaataaccctgataaatgcttcaataatattgaaaaaggaagagtatgagtattcaacatttccgtgtcgcccttattcccttttttgcggcattttgccttcctgtttttgctcacccagaaacgctggtgaaagtaaaagatgctgaagatcagttgggtgcacgagtgggttacatcgaactggatctcaacagcggtaagatccttgagagttttcgccccgaagaacgttttccaatgatgagcacttttaaagttctgctatgtggcgcggtattatcccgtattgacgccgggcaagagcaactcggtcgccgcatacactattctcagaatgacttggttgagtactcaccagtcacagaaaagcatcttacggatggcatgacagtaagagaattatgcagtgctgccataaccatgagtgataacactgcggccaacttacttctgacaacgatcggaggaccgaaggagctaaccgcttttttgcacaacatgggggatcatgtaactcgccttgatcgttgggaaccggagctgaatgaagccataccaaacgacgagcgtgacaccacgatgcctgtagcaatggcaacaacgttgcgcaaactattaactggcgaactacttactctagcttcccggcaacaattaatagactggatggaggcggataaagttgcaggaccacttctgcgctcggcccttccggctggctggtttattgctgataaatctggagccggtgagcgtgggtctcgcggtatcattgcagcactggggccagatggtaagccctcccgtatcgtagttatctacacgacggggagtcaggcaactatggatgaacgaaatagacagatcgctgagataggtgcctcactgattaagcattggtaactgtcagaccaagtttactcatatatactttagattgatttaaaacttcatttttaatttaaaaggatctaggtgaagatcctttttgataatctcatgaccaaaatcccttaacgtgagttttcgttccactgagcgtcagaccccgtagaaaagatcaaaggatcttcttgagatcctttttttctgcgcgtaatctgctgcttgcaaacaaaaaaaccaccgctaccagcggtggtttgtttgccggatcaagagctaccaactctttttccgaaggtaactggcttcagcagagcgcagataccaaatactgttcttctagtgtagccgtagttaggccaccacttcaagaactctgtagcaccgcctacatacctcgctctgctaatcctgttaccagtggctgctgccagtggcgataagtcgtgtcttaccgggttggactcaagacgatagttaccggataaggcgcagcggtcgggctgaacggggggttcgtgcacacagcccagcttggagcgaacgacctacaccgaactgagatacctacagcgtgagctatgagaaagcgccacgcttcccgaagggagaaaggcggacaggtatccggtaagcggcagggtcggaacaggagagcgcacgagggagcttccagggggaaacgcctggtatctttatagtcctgtcgggtttcgccacctctgacttgagcgtcgatttttgtgatgctcgtcaggggggcggagcctatggaaaaacgccagcaacgcggcctttttacggttcctggccttttgctggccttttgctcacatgttctttcctgcgttatcccctgattctgtggataaccgtattaccgcctttgagtgagctgataccgctcgccgcagccgaacgaccgagcgcagcgagtcagtgagcgaggaagcggaagagcgcccaatacgcaaaccgcctctccccgcgcgttggccgattcattaatgcagctggcacgacaggtttcccgactggaaagcgggcagtgagcgcaacgcaattaatgtgagttagctcactcattaggcaccccaggctttacactttatgcttccggctcgtatgttgtgtggaattgtgagcggataacaatttcacacaggaaacagctatgaccatgattacgccagatttaattaag

SEQ ID NO: 603 - DNA, 4892 bp, Artificial Sequence
  Description of Artificial Sequence: Synthetic polynucleotide
gccttaattaggctgcgcgctcgctcgctcactgaggccgcccgggcaaagcccgggcgtcgggcgacctttggtcgcccggcctcagtgagcgagcgagcgcgcagagagggagtggccaactccatcactaggggttccttgtagttaatgattaacccgccatgctacttatctaccagggtaatggggatcctctagaactatagctagtcgacattgattattgactagttattaatagtaatcaattacggggtcattagttcatagcccatatatggagttccgcgttacataacttacggtaaatggcccgcctggctgaccgcccaacgacccccgcccattgacgtcaataatgacgtatgttcccatagtaacgccaatagggactttccattgacgtcaatgggtggagtatttacggtaaactgcccacttggcagtacatcaagtgtatcatatgccaagtacgccccctattgacgtcaatgacggtaaatggcccgcctggcattatgcccagtacatgaccttatgggactttcctacttggcagtacatctacgtattagtcatcgctattaccatgtcgaggccacgttctgcttcactctccccatctcccccccctccccacccccaattttgtatttatttattttttaattattttgtgcagcgatgggggcggggggggggggcgcgcgccaggcggggcggggcggggcgaggggcggggcggggcgaggcggagaggtgcggcggcagccaatcagagcggcgcgctccgaaagtttccttttatggcgaggcggcggcggcggcggccctataaaaagcgaagcgcgcggcgggcgggagcaagcttgaactgaaaaaccagaaagttaactggtaagtttagtctttttgtcttttatttcaggtcccggatccggtggtggtgcaaatcaaagaactgctcctcagtggatgttgcctttacttctaggcctgtacggaagtgttacttctgctctaaaagctgcggaattgtacccgcggccgatccaccggtgccgccaccatgtggacactgggcagaagggccgtggctgggctgctggcatctccctcccccgctcaggctcagacactgacccgcgtccctcggccagcagagctggccccactgtgcgggcggagaggactgcgaaccgacatcgatgctacttgtaccccaaggcgagcaagctccaaccagcgagggctgaaccagatttggaatgtgaagaaacagtctgtctacctgatgaatctgagaaagagcggcactctgggacaccctggcagcctggacgagaccacctacgagcggctggccgaggaaaccctggattccctggccgagttctttgaagacctggctgataagccatacaccttcgaagactatgacgtgagcttcggcagcggcgtgctgacagtcaaactgggcggggacctgggaacatacgtgatcaacaagcagactcctaacaagcagatttggctgtctagtccctcaagcggccctaagaggtacgactggacagggaaaaactgggtgtatagtcacgatggcgtctcactgcatgagctgctggccgctgaactgactaaagccctgaaaactaaactggacctgtcatccctggcatactctggcaaggacgcataactcgaggacggggtgaactacgcctgaggatccgatctttttccctctgccaaaaattatggggacatcatgaagccccttgagcatctgacttctggctaataaaggaaatttattttcattgcaatagtgtgttggaattttttgtgtctctcactcggaagcaattcgttgatctgaatttcgaccacccataatacccattaccctggtagataagtagcatggcgggttaatcattaactacaaggaacccctagtgatggagttggccactccctctctgcgcgctcgctcgctcactgaggccgggcgaccaaaggtcgcccgacgcccgggctttgcccgggcggcctcagtgagcgagcgagcgcgcagccttaattaacctaattcactggccgtcgttttacaacgtcgtgactgggaaaaccctggcgttacccaacttaatcgccttgcagcacatccccctttcgccagctggcgtaatagcgaagaggcccgcaccgatcgcccttcccaacagttgcgcagcctgaatggcgaatgggacgcgccctgtagcggcgcattaagcgcggcgggtgtggtggttacgcgcagcgtgaccgctacacttgccagcgccctagcgcccgctcctttcgctttcttcccttcctttctcgccacgttcgccggctttccccgtcaagctctaaatcgggggctccctttagggttccgatttagtgctttacggcacctcgaccccaaaaaacttgattagggtgatggttcacgtagtgggccatcgccctgatagacggtttttcgccctttgacgttggagtccacgttctttaatagtggactcttgttccaaactggaacaacactcaaccctatctcggtctattcttttgatttataagggattttgccgatttcggcctattggttaaaaaatgagctgatttaacaaaaatttaacgcgaattttaacaaaatattaacgcttacaatttaggtggcacttttcggggaaatgtgcgcggaacccctatttgtttatttttctaaatacattcaaatatgtatccgctcatgagacaataaccctgataaatgcttcaataatattgaaaaaggaagagtatgagtattcaacatttccgtgtcgcccttattcccttttttgcggcattttgccttcctgtttttgctcacccagaaacgctggtgaaagtaaaagatgctgaagatcagttgggtgcacgagtgggttacatcgaactggatctcaacagcggtaagatccttgagagttttcgccccgaagaacgttttccaatgatgagcacttttaaagttctgctatgtggcgcggtattatcccgtattgacgccgggcaagagcaactcggtcgccgcatacactattctcagaatgacttggttgagtactcaccagtcacagaaaagcatcttacggatggcatgacagtaagagaattatgcagtgctgccataaccatgagtgataacactgcggccaacttacttctgacaacgatcggaggaccgaaggagctaaccgcttttttgcacaacatgggggatcatgtaactcgccttgatcgttgggaaccggagctgaatgaagccataccaaacgacgagcgtgacaccacgatgcctgtagcaatggcaacaacgttgcgcaaactattaactggcgaactacttactctagcttcccggcaacaattaatagactggatggaggcggataaagttgcaggaccacttctgcgctcggcccttccggctggctggtttattgctgataaatctggagccggtgagcgtgggtctcgcggtatcattgcagcactggggccagatggtaagccctcccgtatcgtagttatctacacgacggggagtcaggcaactatggatgaacgaaatagacagatcgctgagataggtgcctcactgattaagcattggtaactgtcagaccaagtttactcatatatactttagattgatttaaaacttcatttttaatttaaaaggatctaggtgaagatcctttttgataatctcatgaccaaaatcccttaacgtgagttttcgttccactgagcgtcagaccccgtagaaaagatcaaaggatcttcttgagatcctttttttctgcgcgtaatctgctgcttgcaaacaaaaaaaccaccgctaccagcggtggtttgtttgccggatcaagagctaccaactctttttccgaaggtaactggcttcagcagagcgcagataccaaatactgttcttctagtgtagccgtagttaggccaccacttcaagaactctgtagcaccgcctacatacctcgctctgctaatcctgttaccagtggctgctgccagtggcgataagtcgtgtcttaccgggttggactcaagacgatagttaccggataaggcgcagcggtcgggctgaacggggggttcgtgcacacagcccagcttggagcgaacgacctacaccgaactgagatacctacagcgtgagctatgagaaagcgccacgcttcccgaagggagaaaggcggacaggtatccggtaagcggcagggtcggaacaggagagcgcacgagggagcttccagggggaaacgcctggtatctttatagtcctgtcgggtttcgccacctctgacttgagcgtcgatttttgtgatgctcgtcaggggggcggagcctatggaaaaacgccagcaacgcggcctttttacggttcctggccttttgctggccttttgctcacatgttctttcctgcgttatcccctgattctgtggataaccgtattaccgcctttgagtgagctgataccgctcgccgcagccgaacgaccgagcgcagcgagtcagtgagcgaggaagcggaagagcgcccaatacgcaaaccgcctctccccgcgcgttggccgattcattaatgcagctggcacgacaggtttcccgactggaaagcgggcagtgagcgcaacgcaattaatgtgagttagctcactcattaggcaccccaggctttacactttatgcttccggctcgtatgttgtgtggaattgtgagcggataacaatttcacacaggaaacagctatgaccatgattacgccagatttaattaag

SEQ ID NO: 604 - DNA, 4892 bp, Artificial Sequence
  Description of Artificial Sequence: Synthetic polynucleotide
gccttaattaggctgcgcgctcgctcgctcactgaggccgcccgggcaaagcccgggcgtcgggcgacctttggtcgcccggcctcagtgagcgagcgagcgcgcagagagggagtggccaactccatcactaggggttccttgtagttaatgattaacccgccatgctacttatctaccagggtaatggggatcctctagaactatagctagtcgacattgattattgactagttattaatagtaatcaattacggggtcattagttcatagcccatatatggagttccgcgttacataacttacggtaaatggcccgcctggctgaccgcccaacgacccccgcccattgacgtcaataatgacgtatgttcccatagtaacgccaatagggactttccattgacgtcaatgggtggagtatttacggtaaactgcccacttggcagtacatcaagtgtatcatatgccaagtacgccccctattgacgtcaatgacggtaaatggcccgcctggcattatgcccagtacatgaccttatgggactttcctacttggcagtacatctacgtattagtcatcgctattaccatgtcgaggccacgttctgcttcactctccccatctcccccccctccccacccccaattttgtatttatttattttttaattattttgtgcagcgatgggggcggggggggggggcgcgcgccaggcggggcggggcggggcgaggggcggggcggggcgaggcggagaggtgcggcggcagccaatcagagcggcgcgctccgaaagtttccttttatggcgaggcggcggcggcggcggccctataaaaagcgaagcgcgcggcgggcgggagcaagcttgaactgaaaaaccagaaagttaactggtaagtttagtctttttgtcttttatttcaggtcccggatccggtggtggtgcaaatcaaagaactgctcctcagtggatgttgcctttacttctaggcctgtacggaagtgttacttctgctctaaaagctgcggaattgtacccgcggccgatccaccggtgccgccaccatgtggacactcgggaggagggccgtggctgggctgcttgcttcaccatcacccgcacaggctcagaccctgacaagggtcccaaggccagctgagctggccccactgtgcggtcggagaggactgcgaaccgatatcgatgctacgtgtaccccaaggcgagcaagcagcaaccagcgagggctgaaccagatttggaatgtcaagaaacagagtgtctacctgatgaatctccgaaagtccggcactctgggtcaccctggcagcctggacgaaacgacctacgagcggctggctgaggaaaccctggattccctggccgagttcttcgaagacctggctgataagccatacaccttcgaagactatgacgtgagtttcggcagcggcgtgctgacagtgaaactgggcggggacctgggaacttacgttatcaacaagcagactcctaataagcagatttggctgtctagtccctcaagcggcccaaaaaggtatgactggacaggcaaaaactgggtgtactcccacgatggagtcagtctgcatgagcttctggccgctgaacttactaaggcgctgaaaactaaactggatctgagctccctcgcttacagcgggaaagacgcataactcgaggacggggtgaactacgcctgaggatccgatctttttccctctgccaaaaattatggggacatcatgaagccccttgagcatctgacttctggctaataaaggaaatttattttcattgcaatagtgtgttggaattttttgtgtctctcactcggaagcaattcgttgatctgaatttcgaccacccataatacccattaccctggtagataagtagcatggcgggttaatcattaactacaaggaacccctagtgatggagttggccactccctctctgcgcgctcgctcgctcactgaggccgggcgaccaaaggtcgcccgacgcccgggctttgcccgggcggcctcagtgagcgagcgagcgcgcagccttaattaacctaattcactggccgtcgttttacaacgtcgtgactgggaaaaccctggcgttacccaacttaatcgccttgcagcacatccccctttcgccagctggcgtaatagcgaagaggcccgcaccgatcgcccttcccaacagttgcgcagcctgaatggcgaatgggacgcgccctgtagcggcgcattaagcgcggcgggtgtggtggttacgcgcagcgtgaccgctacacttgccagcgccctagcgcccgctcctttcgctttcttcccttcctttctcgccacgttcgccggctttccccgtcaagctctaaatcgggggctccctttagggttccgatttagtgctttacggcacctcgaccccaaaaaacttgattagggtgatggttcacgtagtgggccatcgccctgatagacggtttttcgccctttgacgttggagtccacgttctttaatagtggactcttgttccaaactggaacaacactcaaccctatctcggtctattcttttgatttataagggattttgccgatttcggcctattggttaaaaaatgagctgatttaacaaaaatttaacgcgaattttaacaaaatattaacgcttacaatttaggtggcacttttcggggaaatgtgcgcggaacccctatttgtttatttttctaaatacattcaaatatgtatccgctcatgagacaataaccctgataaatgcttcaataatattgaaaaaggaagagtatgagtattcaacatttccgtgtcgcccttattcccttttttgcggcattttgccttcctgtttttgctcacccagaaacgctggtgaaagtaaaagatgctgaagatcagttgggtgcacgagtgggttacatcgaactggatctcaacagcggtaagatccttgagagttttcgccccgaagaacgttttccaatgatgagcacttttaaagttctgctatgtggcgcggtattatcccgtattgacgccgggcaagagcaactcggtcgccgcatacactattctcagaatgacttggttgagtactcaccagtcacagaaaagcatcttacggatggcatgacagtaagagaattatgcagtgctgccataaccatgagtgataacactgcggccaacttacttctgacaacgatcggaggaccgaaggagctaaccgcttttttgcacaacatgggggatcatgtaactcgccttgatcgttgggaaccggagctgaatgaagccataccaaacgacgagcgtgacaccacgatgcctgtagcaatggcaacaacgttgcgcaaactattaactggcgaactacttactctagcttcccggcaacaattaatagactggatggaggcggataaagttgcaggaccacttctgcgctcggcccttccggctggctggtttattgctgataaatctggagccggtgagcgtgggtctcgcggtatcattgcagcactggggccagatggtaagccctcccgtatcgtagttatctacacgacggggagtcaggcaactatggatgaacgaaatagacagatcgctgagataggtgcctcactgattaagcattggtaactgtcagaccaagtttactcatatatactttagattgatttaaaacttcatttttaatttaaaaggatctaggtgaagatcctttttgataatctcatgaccaaaatcccttaacgtgagttttcgttccactgagcgtcagaccccgtagaaaagatcaaaggatcttcttgagatcctttttttctgcgcgtaatctgctgcttgcaaacaaaaaaaccaccgctaccagcggtggtttgtttgccggatcaagagctaccaactctttttccgaaggtaactggcttcagcagagcgcagataccaaatactgttcttctagtgtagccgtagttaggccaccacttcaagaactctgtagcaccgcctacatacctcgctctgctaatcctgttaccagtggctgctgccagtggcgataagtcgtgtcttaccgggttggactcaagacgatagttaccggataaggcgcagcggtcgggctgaacggggggttcgtgcacacagcccagcttggagcgaacgacctacaccgaactgagatacctacagcgtgagctatgagaaagcgccacgcttcccgaagggagaaaggcggacaggtatccggtaagcggcagggtcggaacaggagagcgcacgagggagcttccagggggaaacgcctggtatctttatagtcctgtcgggtttcgccacctctgacttgagcgtcgatttttgtgatgctcgtcaggggggcggagcctatggaaaaacgccagcaacgcggcctttttacggttcctggccttttgctggccttttgctcacatgttctttcctgcgttatcccctgattctgtggataaccgtattaccgcctttgagtgagctgataccgctcgccgcagccgaacgaccgagcgcagcgagtcagtgagcgaggaagcggaagagcgcccaatacgcaaaccgcctctccccgcgcgttggccgattcattaatgcagctggcacgacaggtttcccgactggaaagcgggcagtgagcgcaacgcaattaatgtgagttagctcactcattaggcaccccaggctttacactttatgcttccggctcgtatgttgtgtggaattgtgagcggataacaatttcacacaggaaacagctatgaccatgattacgccagatttaattaag

SEQ ID NO: 605 - DNA, 4892 bp, Artificial Sequence
  Description of Artificial Sequence: Synthetic polynucleotide
gccttaattaggctgcgcgctcgctcgctcactgaggccgcccgggcaaagcccgggcgtcgggcgacctttggtcgcccggcctcagtgagcgagcgagcgcgcagagagggagtggccaactccatcactaggggttccttgtagttaatgattaacccgccatgctacttatctaccagggtaatggggatcctctagaactatagctagtcgacattgattattgactagttattaatagtaatcaattacggggtcattagttcatagcccatatatggagttccgcgttacataacttacggtaaatggcccgcctggctgaccgcccaacgacccccgcccattgacgtcaataatgacgtatgttcccatagtaacgccaatagggactttccattgacgtcaatgggtggagtatttacggtaaactgcccacttggcagtacatcaagtgtatcatatgccaagtacgccccctattgacgtcaatgacggtaaatggcccgcctggcattatgcccagtacatgaccttatgggactttcctacttggcagtacatctacgtattagtcatcgctattaccatgtcgaggccacgttctgcttcactctccccatctcccccccctccccacccccaattttgtatttatttattttttaattattttgtgcagcgatgggggcggggggggggggcgcgcgccaggcggggcggggcggggcgaggggcggggcggggcgaggcggagaggtgcggcggcagccaatcagagcggcgcgctccgaaagtttccttttatggcgaggcggcggcggcggcggccctataaaaagcgaagcgcgcggcgggcgggagcaagcttgaactgaaaaaccagaaagttaactggtaagtttagtctttttgtcttttatttcaggtcccggatccggtggtggtgcaaatcaaagaactgctcctcagtggatgttgcctttacttctaggcctgtacggaagtgttacttctgctctaaaagctgcggaattgtacccgcggccgatccaccggtgccgccaccatgtggacactggggaggagggccgtcgctgggctgctggcttcaccttcacccgctcaggctcagaccctcacaagagtgcctaggccagcagagctggccccactctgcgggcggagaggactgcgaaccgacatcgatgcaacatgtacccctaggcgagcaagctccaaccagcgaggcctgaaccagatttggaatgtgaagaaacagagtgtctacctgatgaatctgagaaagagcggcactctgggacacccaggcagcctggacgagaccacctacgagcggctggcagaggaaaccctggattctttggccgagttctttgaagaccttgctgataagccatacacattcgaagactatgacgtcagtttcggaagcggcgtgttgacagtcaaactgggcggagacctgggaacatacgtgatcaacaagcagactcctaacaagcaaatttggctttctagtccatcaagtggacctaagaggtatgactggacagggaagaactgggtgtacagccacgatggcgtctctctgcatgagctgctggccgctgaactgactaaggcactgaaaactaaactggacctgtcatccctggcttattctgggaaagacgcataactcgaggacggggtgaactacgcctgaggatccgatctttttccctctgccaaaaattatggggacatcatgaagccccttgagcatctgacttctggctaataaaggaaatttattttcattgcaatagtgtgttggaattttttgtgtctctcactcggaagcaattcgttgatctgaatttcgaccacccataatacccattaccctggtagataagtagcatggcgggttaatcattaactacaaggaacccctagtgatggagttggccactccctctctgcgcgctcgctcgctcactgaggccgggcgaccaaaggtcgcccgacgcccgggctttgcccgggcggcctcagtgagcgagcgagcgcgcagccttaattaacctaattcactggccgtcgttttacaacgtcgtgactgggaaaaccctggcgttacccaacttaatcgccttgcagcacatccccctttcgccagctggcgtaatagcgaagaggcccgcaccgatcgcccttcccaacagttgcgcagcctgaatggcgaatgggacgcgccctgtagcggcgcattaagcgcggcgggtgtggtggttacgcgcagcgtgaccgctacacttgccagcgccctagcgcccgctcctttcgctttcttcccttcctttctcgccacgttcgccggctttccccgtcaagctctaaatcgggggctccctttagggttccgatttagtgctttacggcacctcgaccccaaaaaacttgattagggtgatggttcacgtagtgggccatcgccctgatagacggtttttcgccctttgacgttggagtccacgttctttaatagtggactcttgttccaaactggaacaacactcaaccctatctcggtctattcttttgatttataagggattttgccgatttcggcctattggttaaaaaatgagctgatttaacaaaaatttaacgcgaattttaacaaaatattaacgcttacaatttaggtggcacttttcggggaaatgtgcgcggaacccctatttgtttatttttctaaatacattcaaatatgtatccgctcatgagacaataaccctgataaatgcttcaataatattgaaaaaggaagagtatgagtattcaacatttccgtgtcgcccttattcccttttttgcggcattttgccttcctgtttttgctcacccagaaacgctggtgaaagtaaaagatgctgaagatcagttgggtgcacgagtgggttacatcgaactggatctcaacagcggtaagatccttgagagttttcgccccgaagaacgttttccaatgatgagcacttttaaagttctgctatgtggcgcggtattatcccgtattgacgccgggcaagagcaactcggtcgccgcatacactattctcagaatgacttggttgagtactcaccagtcacagaaaagcatcttacggatggcatgacagtaagagaattatgcagtgctgccataaccatgagtgataacactgcggccaacttacttctgacaacgatcggaggaccgaaggagctaaccgcttttttgcacaacatgggggatcatgtaactcgccttgatcgttgggaaccggagctgaatgaagccataccaaacgacgagcgtgacaccacgatgcctgtagcaatggcaacaacgttgcgcaaactattaactggcgaactacttactctagcttcccggcaacaattaatagactggatggaggcggataaagttgcaggaccacttctgcgctcggcccttccggctggctggtttattgctgataaatctggagccggtgagcgtgggtctcgcggtatcattgcagcactggggccagatggtaagccctcccgtatcgtagttatctacacgacggggagtcaggcaactatggatgaacgaaatagacagatcgctgagataggtgcctcactgattaagcattggtaactgtcagaccaagtttactcatatatactttagattgatttaaaacttcatttttaatttaaaaggatctaggtgaagatcctttttgataatctcatgaccaaaatcccttaacgtgagttttcgttccactgagcgtcagaccccgtagaaaagatcaaaggatcttcttgagatcctttttttctgcgcgtaatctgctgcttgcaaacaaaaaaaccaccgctaccagcggtggtttgtttgccggatcaagagctaccaactctttttccgaaggtaactggcttcagcagagcgcagataccaaatactgttcttctagtgtagccgtagttaggccaccacttcaagaactctgtagcaccgcctacatacctcgctctgctaatcctgttaccagtggctgctgccagtggcgataagtcgtgtcttaccgggttggactcaagacgatagttaccggataaggcgcagcggtcgggctgaacggggggttcgtgcacacagcccagcttggagcgaacgacctacaccgaactgagatacctacagcgtgagctatgagaaagcgccacgcttcccgaagggagaaaggcggacaggtatccggtaagcggcagggtcggaacaggagagcgcacgagggagcttccagggggaaacgcctggtatctttatagtcctgtcgggtttcgccacctctgacttgagcgtcgatttttgtgatgctcgtcaggggggcggagcctatggaaaaacgccagcaacgcggcctttttacggttcctggccttttgctggccttttgctcacatgttctttcctgcgttatcccctgattctgtggataaccgtattaccgcctttgagtgagctgataccgctcgccgcagccgaacgaccgagcgcagcgagtcagtgagcgaggaagcggaagagcgcccaatacgcaaaccgcctctccccgcgcgttggccgattcattaatgcagctggcacgacaggtttcccgactggaaagcgggcagtgagcgcaacgcaattaatgtgagttagctcactcattaggcaccccaggctttacactttatgcttccggctcgtatgttgtgtggaattgtgagcggataacaatttcacacaggaaacagctatgaccatgattacgccagatttaattaag

SEQ ID NO: 606 - DNA, 4865 bp, Artificial Sequence
  Description of Artificial Sequence: Synthetic polynucleotide
gccttaattaggctgcgcgctcgctcgctcactgaggccgcccgggcaaagcccgggcgtcgggcgacctttggtcgcccggcctcagtgagcgagcgagcgcgcagagagggagtggccaactccatcactaggggttccttgtagttaatgattaacccgccatgctacttatctaccagggtaatggggatcctctagaactatagctagtcgacattgattattgactagttattaatagtaatcaattacggggtcattagttcatagcccatatatggagttccgcgttacataacttacggtaaatggcccgcctggctgaccgcccaacgacccccgcccattgacgtcaataatgacgtatgttcccatagtaacgccaatagggactttccattgacgtcaatgggtggagtatttacggtaaactgcccacttggcagtacatcaagtgtatcatatgccaagtacgccccctattgacgtcaatgacggtaaatggcccgcctggcattatgcccagtacatgaccttatgggactttcctacttggcagtacatctacgtattagtcatcgctattaccatgtcgaggccacgttctgcttcactctccccatctcccccccctccccacccccaattttgtatttatttattttttaattattttgtgcagcgatgggggcggggggggggggcgcgcgccaggcggggcggggcggggcgaggggcggggcggggcgaggcggagaggtgcggcggcagccaatcagagcggcgcgctccgaaagtttccttttatggcgaggcggcggcggcggcggccctataaaaagcgaagcgcgcggcgggcgggagcaagcttgaactgaaaaaccagaaagttaactggtaagtttagtctttttgtcttttatttcaggtcccggatccggtggtggtgcaaatcaaagaactgctcctcagtggatgttgcctttacttctaggcctgtacggaagtgttacttctgctctaaaagctgcggaattgtacccgcggccgatccaccggtgccgccaccatggctgtagctgcagtaaaatgggtgatgtcaaagagaactatcttgaaacatttatttccagtccaaaatggagctttatattgtgtttgtcatctgcgcaccgacatcgatgcgacctgcacgccccgccgcgcaagttcgaaccaacgtggcctcaaccagatttggaatgtcaaaaagcagagtgtctatttgatgaatttgaggaaatctggaactttgggccacccaggctctctagatgagaccacctatgaaagactagcagaggaaacgctggactctttagcagagttttttgaagaccttgcagacaagccatacacgtttgaggactatgatgtctcctttgggagtggtgtcttaactgtcaaactgggtggagatctaggaacctatgtgatcaacaagcagacgccaaacaagcaaatctggctatcttctccatccagtggacctaagcgttatgactggactgggaaaaactgggtgttctcccacgacggcgtgtccctccatgagctgctggccgcagagctcactaaagccttaaaaaccaaactggacttgtcttggttggcctattccggaaaagatgcttgactcgaggacggggtgaactacgcctgaggatccgatctttttccctctgccaaaaattatggggacatcatgaagccccttgagcatctgacttctggctaataaaggaaatttattttcattgcaatagtgtgttggaattttttgtgtctctcactcggaagcaattcgttgatctgaatttcgaccacccataatacccattaccctggtagataagtagcatggcgggttaatcattaactacaaggaacccctagtgatggagttggccactccctctctgcgcgctcgctcgctcactgaggccgggcgaccaaaggtcgcccgacgcccgggctttgcccgggcggcctcagtgagcgagcgagcgcgcagccttaattaacctaattcactggccgtcgttttacaacgtcgtgactgggaaaaccctggcgttacccaacttaatcgccttgcagcacatccccctttcgccagctggcgtaatagcgaagaggcccgcaccgatcgcccttcccaacagttgcgcagcctgaatggcgaatgggacgcgccctgtagcggcgcattaagcgcggcgggtgtggtggttacgcgcagcgtgaccgctacacttgccagcgccctagcgcccgctcctttcgctttcttcccttcctttctcgccacgttcgccggctttccccgtcaagctctaaatcgggggctccctttagggttccgatttagtgctttacggcacctcgaccccaaaaaacttgattagggtgatggttcacgtagtgggccatcgccctgatagacggtttttcgccctttgacgttggagtccacgttctttaatagtggactcttgttccaaactggaacaacactcaaccctatctcggtctattcttttgatttataagggattttgccgatttcggcctattggttaaaaaatgagctgatttaacaaaaatttaacgcgaattttaacaaaatattaacgcttacaatttaggtggcacttttcggggaaatgtgcgcggaacccctatttgtttatttttctaaatacattcaaatatgtatccgctcatgagacaataaccctgataaatgcttcaataatattgaaaaaggaagagtatgagtattcaacatttccgtgtcgcccttattcccttttttgcggcattttgccttcctgtttttgctcacccagaaacgctggtgaaagtaaaagatgctgaagatcagttgggtgcacgagtgggttacatcgaactggatctcaacagcggtaagatccttgagagttttcgccccgaagaacgttttccaatgatgagcacttttaaagttctgctatgtggcgcggtattatcccgtattgacgccgggcaagagcaactcggtcgccgcatacactattctcagaatgacttggttgagtactcaccagtcacagaaaagcatcttacggatggcatgacagtaagagaattatgcagtgctgccataaccatgagtgataacactgcggccaacttacttctgacaacgatcggaggaccgaaggagctaaccgcttttttgcacaacatgggggatcatgtaactcgccttgatcgttgggaaccggagctgaatgaagccataccaaacgacgagcgtgacaccacgatgcctgtagcaatggcaacaacgttgcgcaaactattaactggcgaactacttactctagcttcccggcaacaattaatagactggatggaggcggataaagttgcaggaccacttctgcgctcggcccttccggctggctggtttattgctgataaatctggagccggtgagcgtgggtctcgcggtatcattgcagcactggggccagatggtaagccctcccgtatcgtagttatctacacgacggggagtcaggcaactatggatgaacgaaatagacagatcgctgagataggtgcctcactgattaagcattggtaactgtcagaccaagtttactcatatatactttagattgatttaaaacttcatttttaatttaaaaggatctaggtgaagatcctttttgataatctcatgaccaaaatcccttaacgtgagttttcgttccactgagcgtcagaccccgtagaaaagatcaaaggatcttcttgagatcctttttttctgcgcgtaatctgctgcttgcaaacaaaaaaaccaccgctaccagcggtggtttgtttgccggatcaagagctaccaactctttttccgaaggtaactggcttcagcagagcgcagataccaaatactgttcttctagtgtagccgtagttaggccaccacttcaagaactctgtagcaccgcctacatacctcgctctgctaatcctgttaccagtggctgctgccagtggcgataagtcgtgtcttaccgggttggactcaagacgatagttaccggataaggcgcagcggtcgggctgaacggggggttcgtgcacacagcccagcttggagcgaacgacctacaccgaactgagatacctacagcgtgagctatgagaaagcgccacgcttcccgaagggagaaaggcggacaggtatccggtaagcggcagggtcggaacaggagagcgcacgagggagcttccagggggaaacgcctggtatctttatagtcctgtcgggtttcgccacctctgacttgagcgtcgatttttgtgatgctcgtcaggggggcggagcctatggaaaaacgccagcaacgcggcctttttacggttcctggccttttgctggccttttgctcacatgttctttcctgcgttatcccctgattctgtggataaccgtattaccgcctttgagtgagctgataccgctcgccgcagccgaacgaccgagcgcagcgagtcagtgagcgaggaagcggaagagcgcccaatacgcaaaccgcctctccccgcgcgttggccgattcattaatgcagctggcacgacaggtttcccgactggaaagcgggcagtgagcgcaacgcaattaatgtgagttagctcactcattaggcaccccaggctttacactttatgcttccggctcgtatgttgtgtggaattgtgagcggataacaatttcacacaggaaacagctatgaccatgattacgccagatttaattaag

SEQ ID NO: 607 - DNA, 4865 bp, Artificial Sequence
  Description of Artificial Sequence: Synthetic polynucleotide
gccttaattaggctgcgcgctcgctcgctcactgaggccgcccgggcaaagcccgggcgtcgggcgacctttggtcgcccggcctcagtgagcgagcgagcgcgcagagagggagtggccaactccatcactaggggttccttgtagttaatgattaacccgccatgctacttatctaccagggtaatggggatcctctagaactatagctagtcgacattgattattgactagttattaatagtaatcaattacggggtcattagttcatagcccatatatggagttccgcgttacataacttacggtaaatggcccgcctggctgaccgcccaacgacccccgcccattgacgtcaataatgacgtatgttcccatagtaacgccaatagggactttccattgacgtcaatgggtggagtatttacggtaaactgcccacttggcagtacatcaagtgtatcatatgccaagtacgccccctattgacgtcaatgacggtaaatggcccgcctggcattatgcccagtacatgaccttatgggactttcctacttggcagtacatctacgtattagtcatcgctattaccatgtcgaggccacgttctgcttcactctccccatctcccccccctccccacccccaattttgtatttatttattttttaattattttgtgcagcgatgggggcggggggggggggcgcgcgccaggcggggcggggcggggcgaggggcggggcggggcgaggcggagaggtgcggcggcagccaatcagagcggcgcgctccgaaagtttccttttatggcgaggcggcggcggcggcggccctataaaaagcgaagcgcgcggcgggcgggagcaagcttgaactgaaaaaccagaaagttaactggtaagtttagtctttttgtcttttatttcaggtcccggatccggtggtggtgcaaatcaaagaactgctcctcagtggatgttgcctttacttctaggcctgtacggaagtgttacttctgctctaaaagctgcggaattgtacccgcggccgatccaccggtgccgccaccatggctgtagctgcagtaaaatgggtgatgtcaaagagaactatcttgaaacatttatttccagtccaaaatggagctttatattgtgtttgtcatctgcgaaccgacatcgatgcaacatgtacccctaggcgagcaagctccaaccagcgaggcctgaaccagatttggaatgtgaagaaacagagtgtctacctgatgaatctgagaaagagcggcactctgggacacccaggcagcctggacgagaccacctacgagcggctggcagaggaaaccctggattctttggccgagttctttgaagaccttgctgataagccatacacattcgaagactatgacgtcagtttcggaagcggcgtgttgacagtcaaactgggcggagacctgggaacatacgtgatcaacaagcagactcctaacaagcaaatttggctttctagtccatcaagtggacctaagaggtatgactggacagggaagaactgggtgtacagccacgatggcgtctctctgcatgagctgctggccgctgaactgactaaggcactgaaaactaaactggacctgtcatccctggcttattctgggaaagacgcataactcgaggacggggtgaactacgcctgaggatccgatctttttccctctgccaaaaattatggggacatcatgaagccccttgagcatctgacttctggctaataaaggaaatttattttcattgcaatagtgtgttggaattttttgtgtctctcactcggaagcaattcgttgatctgaatttcgaccacccataatacccattaccctggtagataagtagcatggcgggttaatcattaactacaaggaacccctagtgatggagttggccactccctctctgcgcgctcgctcgctcactgaggccgggcgaccaaaggtcgcccgacgcccgggctttgcccgggcggcctcagtgagcgagcgagcgcgcagccttaattaacctaattcactggccgtcgttttacaacgtcgtgactgggaaaaccctggcgttacccaacttaatcgccttgcagcacatccccctttcgccagctggcgtaatagcgaagaggcccgcaccgatcgcccttcccaacagttgcgcagcctgaatggcgaatgggacgcgccctgtagcggcgcattaagcgcggcgggtgtggtggttacgcgcagcgtgaccgctacacttgccagcgccctagcgcccgctcctttcgctttcttcccttcctttctcgccacgttcgccggctttccccgtcaagctctaaatcgggggctccctttagggttccgatttagtgctttacggcacctcgaccccaaaaaacttgattagggtgatggttcacgtagtgggccatcgccctgatagacggtttttcgccctttgacgttggagtccacgttctttaatagtggactcttgttccaaactggaacaacactcaaccctatctcggtctattcttttgatttataagggattttgccgatttcggcctattggttaaaaaatgagctgatttaacaaaaatttaacgcgaattttaacaaaatattaacgcttacaatttaggtggcacttttcggggaaatgtgcgcggaacccctatttgtttatttttctaaatacattcaaatatgtatccgctcatgagacaataaccctgataaatgcttcaataatattgaaaaaggaagagtatgagtattcaacatttccgtgtcgcccttattcccttttttgcggcattttgccttcctgtttttgctcacccagaaacgctggtgaaagtaaaagatgctgaagatcagttgggtgcacgagtgggttacatcgaactggatctcaacagcggtaagatccttgagagttttcgccccgaagaacgttttccaatgatgagcacttttaaagttctgctatgtggcgcggtattatcccgtattgacgccgggcaagagcaactcggtcgccgcatacactattctcagaatgacttggttgagtactcaccagtcacagaaaagcatcttacggatggcatgacagtaagagaattatgcagtgctgccataaccatgagtgataacactgcggccaacttacttctgacaacgatcggaggaccgaaggagctaaccgcttttttgcacaacatgggggatcatgtaactcgccttgatcgttgggaaccggagctgaatgaagccataccaaacgacgagcgtgacaccacgatgcctgtagcaatggcaacaacgttgcgcaaactattaactggcgaactacttactctagcttcccggcaacaattaatagactggatggaggcggataaagttgcaggaccacttctgcgctcggcccttccggctggctggtttattgctgataaatctggagccggtgagcgtgggtctcgcggtatcattgcagcactggggccagatggtaagccctcccgtatcgtagttatctacacgacggggagtcaggcaactatggatgaacgaaatagacagatcgctgagataggtgcctcactgattaagcattggtaactgtcagaccaagtttactcatatatactttagattgatttaaaacttcatttttaatttaaaaggatctaggtgaagatcctttttgataatctcatgaccaaaatcccttaacgtgagttttcgttccactgagcgtcagaccccgtagaaaagatcaaaggatcttcttgagatcctttttttctgcgcgtaatctgctgcttgcaaacaaaaaaaccaccgctaccagcggtggtttgtttgccggatcaagagctaccaactctttttccgaaggtaactggcttcagcagagcgcagataccaaatactgttcttctagtgtagccgtagttaggccaccacttcaagaactctgtagcaccgcctacatacctcgctctgctaatcctgttaccagtggctgctgccagtggcgataagtcgtgtcttaccgggttggactcaagacgatagttaccggataaggcgcagcggtcgggctgaacggggggttcgtgcacacagcccagcttggagcgaacgacctacaccgaactgagatacctacagcgtgagctatgagaaagcgccacgcttcccgaagggagaaaggcggacaggtatccggtaagcggcagggtcggaacaggagagcgcacgagggagcttccagggggaaacgcctggtatctttatagtcctgtcgggtttcgccacctctgacttgagcgtcgatttttgtgatgctcgtcaggggggcggagcctatggaaaaacgccagcaacgcggcctttttacggttcctggccttttgctggccttttgctcacatgttctttcctgcgttatcccctgattctgtggataaccgtattaccgcctttgagtgagctgataccgctcgccgcagccgaacgaccgagcgcagcgagtcagtgagcgaggaagcggaagagcgcccaatacgcaaaccgcctctccccgcgcgttggccgattcattaatgcagctggcacgacaggtttcccgactggaaagcgggcagtgagcgcaacgcaattaatgtgagttagctcactcattaggcaccccaggctttacactttatgcttccggctcgtatgttgtgtggaattgtgagcggataacaatttcacacaggaaacagctatgaccatgattacgccagatttaattaag

SEQ ID NO: 608 - DNA, 4841 bp, Artificial Sequence
  Description of Artificial Sequence: Synthetic polynucleotide
gccttaattaggctgcgcgctcgctcgctcactgaggccgcccgggcaaagcccgggcgtcgggcgacctttggtcgcccggcctcagtgagcgagcgagcgcgcagagagggagtggccaactccatcactaggggttccttgtagttaatgattaacccgccatgctacttatctaccagggtaatggggatcctctagaactatagctagtcgacattgattattgactagttattaatagtaatcaattacggggtcattagttcatagcccatatatggagttccgcgttacataacttacggtaaatggcccgcctggctgaccgcccaacgacccccgcccattgacgtcaataatgacgtatgttcccatagtaacgccaatagggactttccattgacgtcaatgggtggagtatttacggtaaactgcccacttggcagtacatcaagtgtatcatatgccaagtacgccccctattgacgtcaatgacggtaaatggcccgcctggcattatgcccagtacatgaccttatgggactttcctacttggcagtacatctacgtattagtcatcgctattaccatgtcgaggccacgttctgcttcactctccccatctcccccccctccccacccccaattttgtatttatttattttttaattattttgtgcagcgatgggggcggggggggggggcgcgcgccaggcggggcggggcggggcgaggggcggggcggggcgaggcggagaggtgcggcggcagccaatcagagcggcgcgctccgaaagtttccttttatggcgaggcggcggcggcggcggccctataaaaagcgaagcgcgcggcgggcgggagcaagcttgaactgaaaaaccagaaagttaactggtaagtttagtctttttgtcttttatttcaggtcccggatccggtggtggtgcaaatcaaagaactgctcctcagtggatgttgcctttacttctaggcctgtacggaagtgttacttctgctctaaaagctgcggaattgtacccgcggccgatccaccggtgccgccaccatgttgagccgggcagtgtgcggcaccagcaggcagctggctccggctttggggtatctgggctccaggcagctgcgcaccgacatcgatgcgacctgcacgccccgccgcgcaagttcgaaccaacgtggcctcaaccagatttggaatgtcaaaaagcagagtgtctatttgatgaatttgaggaaatctggaactttgggccacccaggctctctagatgagaccacctatgaaagactagcagaggaaacgctggactctttagcagagttttttgaagaccttgcagacaagccatacacgtttgaggactatgatgtctcctttgggagtggtgtcttaactgtcaaactgggtggagatctaggaacctatgtgatcaacaagcagacgccaaacaagcaaatctggctatcttctccatccagtggacctaagcgttatgactggactgggaaaaactgggtgttctcccacgacggcgtgtccctccatgagctgctggccgcagagctcactaaagccttaaaaaccaaactggacttgtcttggttggcctattccggaaaagatgcttgactcgaggacggggtgaactacgcctgaggatccgatctttttccctctgccaaaaattatggggacatcatgaagccccttgagcatctgacttctggctaataaaggaaatttattttcattgcaatagtgtgttggaattttttgtgtctctcactcggaagcaattcgttgatctgaatttcgaccacccataatacccattaccctggtagataagtagcatggcgggttaatcattaactacaaggaacccctagtgatggagttggccactccctctctgcgcgctcgctcgctcactgaggccgggcgaccaaaggtcgcccgacgcccgggctttgcccgggcggcctcagtgagcgagcgagcgcgcagccttaattaacctaattcactggccgtcgttttacaacgtcgtgactgggaaaaccctggcgttacccaacttaatcgccttgcagcacatccccctttcgccagctggcgtaatagcgaagaggcccgcaccgatcgcccttcccaacagttgcgcagcctgaatggcgaatgggacgcgccctgtagcggcgcattaagcgcggcgggtgtggtggttacgcgcagcgtgaccgctacacttgccagcgccctagcgcccgctcctttcgctttcttcccttcctttctcgccacgttcgccggctttccccgtcaagctctaaatcgggggctccctttagggttccgatttagtgctttacggcacctcgaccccaaaaaacttgattagggtgatggttcacgtagtgggccatcgccctgatagacggtttttcgccctttgacgttggagtccacgttctttaatagtggactcttgttccaaactggaacaacactcaaccctatctcggtctattcttttgatttataagggattttgccgatttcggcctattggttaaaaaatgagctgatttaacaaaaatttaacgcgaattttaacaaaatattaacgcttacaatttaggtggcacttttcggggaaatgtgcgcggaacccctatttgtttatttttctaaatacattcaaatatgtatccgctcatgagacaataaccctgataaatgcttcaataatattgaaaaaggaagagtatgagtattcaacatttccgtgtcgcccttattcccttttttgcggcattttgccttcctgtttttgctcacccagaaacgctggtgaaagtaaaagatgctgaagatcagttgggtgcacgagtgggttacatcgaactggatctcaacagcggtaagatccttgagagttttcgccccgaagaacgttttccaatgatgagcacttttaaagttctgctatgtggcgcggtattatcccgtattgacgccgggcaagagcaactcggtcgccgcatacactattctcagaatgacttggttgagtactcaccagtcacagaaaagcatcttacggatggcatgacagtaagagaattatgcagtgctgccataaccatgagtgataacactgcggccaacttacttctgacaacgatcggaggaccgaaggagctaaccgcttttttgcacaacatgggggatcatgtaactcgccttgatcgttgggaaccggagctgaatgaagccataccaaacgacgagcgtgacaccacgatgcctgtagcaatggcaacaacgttgcgcaaactattaactggcgaactacttactctagcttcccggcaacaattaatagactggatggaggcggataaagttgcaggaccacttctgcgctcggcccttccggctggctggtttattgctgataaatctggagccggtgagcgtgggtctcgcggtatcattgcagcactggggccagatggtaagccctcccgtatcgtagttatctacacgacggggagtcaggcaactatggatgaacgaaatagacagatcgctgagataggtgcctcactgattaagcattggtaactgtcagaccaagtttactcatatatactttagattgatttaaaacttcatttttaatttaaaaggatctaggtgaagatcctttttgataatctcatgaccaaaatcccttaacgtgagttttcgttccactgagcgtcagaccccgtagaaaagatcaaaggatcttcttgagatcctttttttctgcgcgtaatctgctgcttgcaaacaaaaaaaccaccgctaccagcggtggtttgtttgccggatcaagagctaccaactctttttccgaaggtaactggcttcagcagagcgcagataccaaatactgttcttctagtgtagccgtagttaggccaccacttcaagaactctgtagcaccgcctacatacctcgctctgctaatcctgttaccagtggctgctgccagtggcgataagtcgtgtcttaccgggttggactcaagacgatagttaccggataaggcgcagcggtcgggctgaacggggggttcgtgcacacagcccagcttggagcgaacgacctacaccgaactgagatacctacagcgtgagctatgagaaagcgccacgcttcccgaagggagaaaggcggacaggtatccggtaagcggcagggtcggaacaggagagcgcacgagggagcttccagggggaaacgcctggtatctttatagtcctgtcgggtttcgccacctctgacttgagcgtcgatttttgtgatgctcgtcaggggggcggagcctatggaaaaacgccagcaacgcggcctttttacggttcctggccttttgctggccttttgctcacatgttctttcctgcgttatcccctgattctgtggataaccgtattaccgcctttgagtgagctgataccgctcgccgcagccgaacgaccgagcgcagcgagtcagtgagcgaggaagcggaagagcgcccaatacgcaaaccgcctctccccgcgcgttggccgattcattaatgcagctggcacgacaggtttcccgactggaaagcgggcagtgagcgcaacgcaattaatgtgagttagctcactcattaggcaccccaggctttacactttatgcttccggctcgtatgttgtgtggaattgtgagcggataacaatttcacacaggaaacagctatgaccatgattacgccagatttaattaag

SEQ ID NO: 609 - DNA, 5950 bp, Artificial Sequence
  Description of Artificial Sequence: Synthetic polynucleotide
gccttaattaggctgcgcgctcgctcgctcactgaggccgcccgggcaaagcccgggcgtcgggcgacctttggtcgcccggcctcagtgagcgagcgagcgcgcagagagggagtggccaactccatcactaggggttccttgtagttaatgattaacccgccatgctacttatctaccagggtaatggggatcctctagaactatagctagtcgacattgattattgactagttattaatagtaatcaattacggggtcattagttcatagcccatatatggagttccgcgttacataacttacggtaaatggcccgcctggctgaccgcccaacgacccccgcccattgacgtcaataatgacgtatgttcccatagtaacgccaatagggactttccattgacgtcaatgggtggactatttacggtaaactgcccacttggcagtacatcaagtgtatcatatgccaagtacgccccctattgacgtcaatgacggtaaatggcccgcctggcattatgcccagtacatgaccttatgggactttcctacttggcagtacatctacgtattagtcatcgctattaccatgggtcgaggtgagccccacgttctgcttcactctccccatctcccccccctccccacccccaattttgtatttatttattttttaattattttgtgcagcgatgggggcggggggggggggggcgcgcgccaggcggggcggggcggggcgaggggcggggcggggcgaggcggagaggtgcggcggcagccaatcagagcggcgcgctccgaaagtttccttttatggcgaggcggcggcggcggcggccctataaaaagcgaagcgcgcggcgggcgggagtcgctgcgttgccttcgccccgtgccccgctccgcgccgcctcgcgccgcccgccccggctctgactgaccgcgttactcccacaggtgagcgggcgggacggcccttctcctccgggctgtaattagcgcttggtttaatgacggctcgtttcttttctgtggctgcgtgaaagccttaaagggctccgggagggccctttgtgcgggggggagcggctcggggggtgcgtgcgtgtgtgtgtgcgtggggagcgccgcgtgcggcccgcgctgcccggcggctgtgagcgctgcgggcgcggcgcggggctttgtgcgctccgcgtgtgcgcgaggggagcgcggccgggggcggtgccccgcggtgcgggggggctgcgaggggaacaaaggctgcgtgcggggtgtgtgcgtgggggggtgagcagggggtgtgggcgcggcggtcgggctgtaacccccccctgcacccccctccccgagttgctgagcacggcccggcttcgggtgcggggctccgtgcggggcgtggcgcggggctcgccgtgccgggcggggggtggcggcaggtgggggtgccgggcggggcggggccgcctcgggccggggagggctcgggggaggggcgcggcggccccggagcgccggcggctgtcgaggcgcggcgagccgcagccattgccttttatggtaatcgtgcgagagggcgcagggacttcctttgtcccaaatctggcggagccgaaatctgggaggcgccgccgcaccccctctagcgggcgcgggcgaagcggtgcggcgccggcaggaaggaaatgggcggggagggccttcgtgcgtcgccgcgccgccgtccccttctccatctccagcctcggggctgccgcagggggacggctgccttcgggggggacggggcagggcggggttcggcttctggcgtgtgaccggcggctctagagcctctgctaaccatgttcatgccttcttctttttcctacagctcctgggcaacgtgctggttgttgtgctgtctcatcattttggcaaagaattaagcttgaactgaaaaaccagaaagttaactggtaagtttagtctttttgtcttttatttcaggtcccggatccggtggtggtgcaaatcaaagaactgctcctcagtggatgttgcctttacttctaggcctgtacggaagtgttacttctgctctaaaagctgcggaattgtacccgcggccgatccaccggtatgtggactctcgggcgccgcgcagtagccggcctcctggcgtcacccagcccagcccaggcccagaccctcacccgggtcccgcggccggcagagttggccccactctgcggccgccgtggcctgcgcaccgacatcgatgcgacctgcacgccccgccgcgcaagttcgaaccaacgtggcctcaaccagatttggaatgtcaaaaagcagagtgtctatttgatgaatttgaggaaatctggaactttgggccacccaggctctctagatgagaccacctatgaaagactagcagaggaaacgctggactctttagcagagttttttgaagaccttgcagacaagccatacacgtttgaggactatgatgtctcctttgggagtggtgtcttaactgtcaaactgggtggagatctaggaacctatgtgatcaacaagcagacgccaaacaagcaaatctggctatcttctccatccagtggacctaagcgttatgactggactgggaaaaactgggtgtactcccacgacggcgtgtccctccatgagctgctggccgcagagctcactaaagccttaaaaaccaaactggacttgtcttccttggcctattccggaaaagatgcttgactcgaggacggggtgaactacgcctgaggatccgatctttttccctctgccaaaaattatggggacatcatgaagccccttgagcatctgacttctggctaataaaggaaatttattttcattgcaatagtgtgttggaattttttgtgtctctcactcggaagcaattcgttgatctgaatttcgaccacccataatacccattaccctggtagataagtagcatggcgggttaatcattaactacaaggaacccctagtgatggagttggccactccctctctgcgcgctcgctcgctcactgaggccgggcgaccaaaggtcgcccgacgcccgggctttgcccgggcggcctcagtgagcgagcgagcgcgcagccttaattaacctaattcactggccgtcgttttacaacgtcgtgactgggaaaaccctggcgttacccaacttaatcgccttgcagcacatccccctttcgccagctggcgtaatagcgaagaggcccgcaccgatcgcccttcccaacagttgcgcagcctgaatggcgaatgggacgcgccctgtagcggcgcattaagcgcggcgggtgtggtggttacgcgcagcgtgaccgctacacttgccagcgccctagcgcccgctcctttcgctttcttcccttcctttctcgccacgttcgccggctttccccgtcaagctctaaatcgggggctccctttagggttccgatttagtgctttacggcacctcgaccccaaaaaacttgattagggtgatggttcacgtagtgggccatcgccctgatagacggtttttcgccctttgacgttggagtccacgttctttaatagtggactcttgttccaaactggaacaacactcaaccctatctcggtctattcttttgatttataagggattttgccgatttcggcctattggttaaaaaatgagctgatttaacaaaaatttaacgcgaattttaacaaaatattaacgcttacaatttaggtggcacttttcggggaaatgtgcgcggaacccctatttgtttatttttctaaatacattcaaatatgtatccgctcatgagacaataaccctgataaatgcttcaataatattgaaaaaggaagagtatgagtattcaacatttccgtgtcgcccttattcccttttttgcggcattttgccttcctgtttttgctcacccagaaacgctggtgaaagtaaaagatgctgaagatcagttgggtgcacgagtgggttacatcgaactggatctcaacagcggtaagatccttgagagttttcgccccgaagaacgttttccaatgatgagcacttttaaagttctgctatgtggcgcggtattatcccgtattgacgccgggcaagagcaactcggtcgccgcatacactattctcagaatgacttggttgagtactcaccagtcacagaaaagcatcttacggatggcatgacagtaagagaattatgcagtgctgccataaccatgagtgataacactgcggccaacttacttctgacaacgatcggaggaccgaaggagctaaccgcttttttgcacaacatgggggatcatgtaactcgccttgatcgttgggaaccggagctgaatgaagccataccaaacgacgagcgtgacaccacgatgcctgtagcaatggcaacaacgttgcgcaaactattaactggcgaactacttactctagcttcccggcaacaattaatagactggatggaggcggataaagttgcaggaccacttctgcgctcggcccttccggctggctggtttattgctgataaatctggagccggtgagcgtgggtctcgcggtatcattgcagcactggggccagatggtaagccctcccgtatcgtagttatctacacgacggggagtcaggcaactatggatgaacgaaatagacagatcgctgagataggtgcctcactgattaagcattggtaactgtcagaccaagtttactcatatatactttagattgatttaaaacttcatttttaatttaaaaggatctaggtgaagatcctttttgataatctcatgaccaaaatcccttaacgtgagttttcgttccactgagcgtcagaccccgtagaaaagatcaaaggatcttcttgagatcctttttttctgcgcgtaatctgctgcttgcaaacaaaaaaaccaccgctaccagcggtggtttgtttgccggatcaagagctaccaactctttttccgaaggtaactggcttcagcagagcgcagataccaaatactgttcttctagtgtagccgtagttaggccaccacttcaagaactctgtagcaccgcctacatacctcgctctgctaatcctgttaccagtggctgctgccagtggcgataagtcgtgtcttaccgggttggactcaagacgatagttaccggataaggcgcagcggtcgggctgaacggggggttcgtgcacacagcccagcttggagcgaacgacctacaccgaactgagatacctacagcgtgagctatgagaaagcgccacgcttcccgaagggagaaaggcggacaggtatccggtaagcggcagggtcggaacaggagagcgcacgagggagcttccagggggaaacgcctggtatctttatagtcctgtcgggtttcgccacctctgacttgagcgtcgatttttgtgatgctcgtcaggggggcggagcctatggaaaaacgccagcaacgcggcctttttacggttcctggccttttgctggccttttgctcacatgttctttcctgcgttatcccctgattctgtggataaccgtattaccgcctttgagtgagctgataccgctcgccgcagccgaacgaccgagcgcagcgagtcagtgagcgaggaagcggaagagcgcccaatacgcaaaccgcctctccccgcgcgttggccgattcattaatgcagctggcacgacaggtttcccgactggaaagcgggcagtgagcgcaacgcaattaatgtgagttagctcactcattaggcaccccaggctttacactttatgcttccggctcgtatgttgtgtggaattgtgagcggataacaatttcacacaggaaacagctatgaccatgattacgccagatttaattaag

SEQ ID NO: 610 - DNA, 4748 bp, Artificial Sequence
  Description of Artificial Sequence: Synthetic polynucleotide
gccttaattaggctgcgcgctcgctcgctcactgaggccgcccgggcaaagcccgggcgtcgggcgacctttggtcgcccggcctcagtgagcgagcgagcgcgcagagagggagtggccaactccatcactaggggttccttgtagttaatgattaacccgccatgctacttatctaccagggtaatggggatcctctagaactataggttgacattgattattgactagttattaatagtaatcaattacggggtcattagttcatagcccatatatggagttccgcgttacataacttacggtaaatggcccgcctggctgaccgcccaacgacccccgcccattgacgtcaataatgacgtatgttcccatagtaacgccaatagggactttccattgacgtcaatgggtggagtatttacggtaaactgcccacttggcagtacatcaagtgtatcatatgccaagtacgccccctattgacgtcaatgacggtaaatggcccgcctggcattatgcccagtacatgaccttatgggactttcctacttggcagtacatctacgtattagtcatcgctattaccatggtgatgcggttttggcagtacatcaatgggcgtggatagcggtttgactcacggggatttccaagtctccaccccattgacgtcaatgggagtttgttttggcaccaaaatcaacgggactttccaaaatgtcgtaacaactccgccccattgacgcaaatgggcggtaggcgtgtacggtgggaggtctatataagcagagctctctggctaactagagaacccactgcttactggcttatcgaaattaatacgactcactatagggagacccaagctggctagcgtttaaacttcgggagcaagcttggtaccgagctcggatccgccgccaccatgtggactctcgggcgccgcgcagtagccggcctcctggcgtcacccagcccagcccaggcccagaccctcacccgggtcccgcggccggcagagttggccccactctgcggccgccgtggcctgcgcaccgacatcgatgcgacctgcacgccccgccgcgcaagttcgaaccaacgtggcctcaaccagatttggaatgtcaaaaagcagagtgtctatttgatgaatttgaggaaatctggaactttgggccacccaggctctctagatgagaccacctatgaaagactagcagaggaaacgctggactctttagcagagttttttgaagaccttgcagacaagccatacacgtttgaggactatgatgtctcctttgggagtggtgtcttaactgtcaaactgggtggagatctaggaacctatgtgatcaacaagcagacgccaaacaagcaaatctggctatcttctccatccagtggacctaagcgttatgactggactgggaaaaactgggtgtactcccacgacggcgtgtccctccatgagctgctggccgcagagctcactaaagccttaaaaaccaaactggacttgtcttccttggcctattccggaaaagatgcttgactcgaggacggggtgaactacgcctgaggatccgatctttttccctctgccaaaaattatggggacatcatgaagccccttgagcatctgacttctggctaataaaggaaatttattttcattgcaatagtgtgttggaattttttgtgtctctcactcggaagcaattcgttgatctgaatttcgaccacccataatacccattaccctggtagataagtagcatggcgggttaatcattaactacaaggaacccctagtgatggagttggccactccctctctgcgcgctcgctcgctcactgaggccgggcgaccaaaggtcgcccgacgcccgggctttgcccgggcggcctcagtgagcgagcgagcgcgcagccttaattaacctaattcactggccgtcgttttacaacgtcgtgactgggaaaaccctggcgttacccaacttaatcgccttgcagcacatccccctttcgccagctggcgtaatagcgaagaggcccgcaccgatcgcccttcccaacagttgcgcagcctgaatggcgaatgggacgcgccctgtagcggcgcattaagcgcggcgggtgtggtggttacgcgcagcgtgaccgctacacttgccagcgccctagcgcccgctcctttcgctttcttcccttcctttctcgccacgttcgccggctttccccgtcaagctctaaatcgggggctccctttagggttccgatttagtgctttacggcacctcgaccccaaaaaacttgattagggtgatggttcacgtagtgggccatcgccctgatagacggtttttcgccctttgacgttggagtccacgttctttaatagtggactcttgttccaaactggaacaacactcaaccctatctcggtctattcttttgatttataagggattttgccgatttcggcctattggttaaaaaatgagctgatttaacaaaaatttaacgcgaattttaacaaaatattaacgcttacaatttaggtggcacttttcggggaaatgtgcgcggaacccctatttgtttatttttctaaatacattcaaatatgtatccgctcatgagacaataaccctgataaatgcttcaataatattgaaaaaggaagagtatgagtattcaacatttccgtgtcgcccttattcccttttttgcggcattttgccttcctgtttttgctcacccagaaacgctggtgaaagtaaaagatgctgaagatcagttgggtgcacgagtgggttacatcgaactggatctcaacagcggtaagatccttgagagttttcgccccgaagaacgttttccaatgatgagcacttttaaagttctgctatgtggcgcggtattatcccgtattgacgccgggcaagagcaactcggtcgccgcatacactattctcagaatgacttggttgagtactcaccagtcacagaaaagcatcttacggatggcatgacagtaagagaattatgcagtgctgccataaccatgagtgataacactgcggccaacttacttctgacaacgatcggaggaccgaaggagctaaccgcttttttgcacaacatgggggatcatgtaactcgccttgatcgttgggaaccggagctgaatgaagccataccaaacgacgagcgtgacaccacgatgcctgtagcaatggcaacaacgttgcgcaaactattaactggcgaactacttactctagcttcccggcaacaattaatagactggatggaggcggataaagttgcaggaccacttctgcgctcggcccttccggctggctggtttattgctgataaatctggagccggtgagcgtgggtctcgcggtatcattgcagcactggggccagatggtaagccctcccgtatcgtagttatctacacgacggggagtcaggcaactatggatgaacgaaatagacagatcgctgagataggtgcctcactgattaagcattggtaactgtcagaccaagtttactcatatatactttagattgatttaaaacttcatttttaatttaaaaggatctaggtgaagatcctttttgataatctcatgaccaaaatcccttaacgtgagttttcgttccactgagcgtcagaccccgtagaaaagatcaaaggatcttcttgagatcctttttttctgcgcgtaatctgctgcttgcaaacaaaaaaaccaccgctaccagcggtggtttgtttgccggatcaagagctaccaactctttttccgaaggtaactggcttcagcagagcgcagataccaaatactgttcttctagtgtagccgtagttaggccaccacttcaagaactctgtagcaccgcctacatacctcgctctgctaatcctgttaccagtggctgctgccagtggcgataagtcgtgtcttaccgggttggactcaagacgatagttaccggataaggcgcagcggtcgggctgaacggggggttcgtgcacacagcccagcttggagcgaacgacctacaccgaactgagatacctacagcgtgagctatgagaaagcgccacgcttcccgaagggagaaaggcggacaggtatccggtaagcggcagggtcggaacaggagagcgcacgagggagcttccagggggaaacgcctggtatctttatagtcctgtcgggtttcgccacctctgacttgagcgtcgatttttgtgatgctcgtcaggggggcggagcctatggaaaaacgccagcaacgcggcctttttacggttcctggccttttgctggccttttgctcacatgttctttcctgcgttatcccctgattctgtggataaccgtattaccgcctttgagtgagctgataccgctcgccgcagccgaacgaccgagcgcagcgagtcagtgagcgaggaagcggaagagcgcccaatacgcaaaccgcctctccccgcgcgttggccgattcattaatgcagctggcacgacaggtttcccgactggaaagcgggcagtgagcgcaacgcaattaatgtgagttagctcactcattaggcaccccaggctttacactttatgcttccggctcgtatgttgtgtggaattgtgagcggataacaatttcacacaggaaacagctatgaccatgattacgccagatttaattaag

SEQ ID NO: 611 - DNA, 4910 bp, Artificial Sequence
  Description of Artificial Sequence: Synthetic polynucleotide
gccttaattaggctgcgcgctcgctcgctcactgaggccgcccgggcaaagcccgggcgtcgggcgacctttggtcgcccggcctcagtgagcgagcgagcgcgcagagagggagtggccaactccatcactaggggttccttgtagttaatgattaacccgccatgctacttatctaccagggtaatggggatcctctagaactataggttgacattgattattgactagttattaatagtaatcaattacggggtcattagttcatagcccatatatggagttccgcgttacataacttacggtaaatggcccgcctggctgaccgcccaacgacccccgcccattgacgtcaataatgacgtatgttcccatagtaacgccaatagggactttccattgacgtcaatgggtggagtatttacggtaaactgcccacttggcagtacatcaagtgtatcatatgccaagtacgccccctattgacgtcaatgacggtaaatggcccgcctggcattatgcccagtacatgaccttatgggactttcctacttggcagtacatctacgtattagtcatcgctattaccatggtgatgcggttttggcagtacatcaatgggcgtggatagcggtttgactcacggggatttccaagtctccaccccattgacgtcaatgggagtttgttttggcaccaaaatcaacgggactttccaaaatgtcgtaacaactccgccccattgacgcaaatgggcggtaggcgtgtacggtgggaggtctatataagcagagctctctggctaactagagaacccactgcttactggcttatcgaaattaatacgactcactatagggagacccaagctggctagcgtttaaacttcgggagcaagcttgaactgaaaaaccagaaagttaactggtaagtttagtctttttgtcttttatttcaggtcccggatccggtggtggtgcaaatcaaagaactgctcctcagtggatgttgcctttacttctaggcctgtacggaagtgttacttctgctctaaaagctgcggaattgtacccgcggccgatccaccggtatgtggactctcgggcgccgcgcagtagccggcctcctggcgtcacccagcccagcccaggcccagaccctcacccgggtcccgcggccggcagagttggccccactctgcggccgccgtggcctgcgcaccgacatcgatgcgacctgcacgccccgccgcgcaagttcgaaccaacgtggcctcaaccagatttggaatgtcaaaaagcagagtgtctatttgatgaatttgaggaaatctggaactttgggccacccaggctctctagatgagaccacctatgaaagactagcagaggaaacgctggactctttagcagagttttttgaagaccttgcagacaagccatacacgtttgaggactatgatgtctcctttgggagtggtgtcttaactgtcaaactgggtggagatctaggaacctatgtgatcaacaagcagacgccaaacaagcaaatctggctatcttctccatccagtggacctaagcgttatgactggactgggaaaaactgggtgtactcccacgacggcgtgtccctccatgagctgctggccgcagagctcactaaagccttaaaaaccaaactggacttgtcttccttggcctattccggaaaagatgcttgactcgaggacggggtgaactacgcctgaggatccgatctttttccctctgccaaaaattatggggacatcatgaagccccttgagcatctgacttctggctaataaaggaaatttattttcattgcaatagtgtgttggaattttttgtgtctctcactcggaagcaattcgttgatctgaatttcgaccacccataatacccattaccctggtagataagtagcatggcgggttaatcattaactacaaggaacccctagtgatggagttggccactccctctctgcgcgctcgctcgctcactgaggccgggcgaccaaaggtcgcccgacgcccgggctttgcccgggcggcctcagtgagcgagcgagcgcgcagccttaattaacctaattcactggccgtcgttttacaacgtcgtgactgggaaaaccctggcgttacccaacttaatcgccttgcagcacatccccctttcgccagctggcgtaatagcgaagaggcccgcaccgatcgcccttcccaacagttgcgcagcctgaatggcgaatgggacgcgccctgtagcggcgcattaagcgcggcgggtgtggtggttacgcgcagcgtgaccgctacacttgccagcgccctagcgcccgctcctttcgctttcttcccttcctttctcgccacgttcgccggctttccccgtcaagctctaaatcgggggctccctttagggttccgatttagtgctttacggcacctcgaccccaaaaaacttgattagggtgatggttcacgtagtgggccatcgccctgatagacggtttttcgccctttgacgttggagtccacgttctttaatagtggactcttgttccaaactggaacaacactcaaccctatctcggtctattcttttgatttataagggattttgccgatttcggcctattggttaaaaaatgagctgatttaacaaaaatttaacgcgaattttaacaaaatattaacgcttacaatttaggtggcacttttcggggaaatgtgcgcggaacccctatttgtttatttttctaaatacattcaaatatgtatccgctcatgagacaataaccctgataaatgcttcaataatattgaaaaaggaagagtatgagtattcaacatttccgtgtcgcccttattcccttttttgcggcattttgccttcctgtttttgctcacccagaaacgctggtgaaagtaaaagatgctgaagatcagttgggtgcacgagtgggttacatcgaactggatctcaacagcggtaagatccttgagagttttcgccccgaagaacgttttccaatgatgagcacttttaaagttctgctatgtggcgcggtattatcccgtattgacgccgggcaagagcaactcggtcgccgcatacactattctcagaatgacttggttgagtactcaccagtcacagaaaagcatcttacggatggcatgacagtaagagaattatgcagtgctgccataaccatgagtgataacactgcggccaacttacttctgacaacgatcggaggaccgaaggagctaaccgcttttttgcacaacatgggggatcatgtaactcgccttgatcgttgggaaccggagctgaatgaagccataccaaacgacgagcgtgacaccacgatgcctgtagcaatggcaacaacgttgcgcaaactattaactggcgaactacttactctagcttcccggcaacaattaatagactggatggaggcggataaagttgcaggaccacttctgcgctcggcccttccggctggctggtttattgctgataaatctggagccggtgagcgtgggtctcgcggtatcattgcagcactggggccagatggtaagccctcccgtatcgtagttatctacacgacggggagtcaggcaactatggatgaacgaaatagacagatcgctgagataggtgcctcactgattaagcattggtaactgtcagaccaagtttactcatatatactttagattgatttaaaacttcatttttaatttaaaaggatctaggtgaagatcctttttgataatctcatgaccaaaatcccttaacgtgagttttcgttccactgagcgtcagaccccgtagaaaagatcaaaggatcttcttgagatcctttttttctgcgcgtaatctgctgcttgcaaacaaaaaaaccaccgctaccagcggtggtttgtttgccggatcaagagctaccaactctttttccgaaggtaactggcttcagcagagcgcagataccaaatactgttcttctagtgtagccgtagttaggccaccacttcaagaactctgtagcaccgcctacatacctcgctctgctaatcctgttaccagtggctgctgccagtggcgataagtcgtgtcttaccgggttggactcaagacgatagttaccggataaggcgcagcggtcgggctgaacggggggttcgtgcacacagcccagcttggagcgaacgacctacaccgaactgagatacctacagcgtgagctatgagaaagcgccacgcttcccgaagggagaaaggcggacaggtatccggtaagcggcagggtcggaacaggagagcgcacgagggagcttccagggggaaacgcctggtatctttatagtcctgtcgggtttcgccacctctgacttgagcgtcgatttttgtgatgctcgtcaggggggcggagcctatggaaaaacgccagcaacgcggcctttttacggttcctggccttttgctggccttttgctcacatgttctttcctgcgttatcccctgattctgtggataaccgtattaccgcctttgagtgagctgataccgctcgccgcagccgaacgaccgagcgcagcgagtcagtgagcgaggaagcggaagagcgcccaatacgcaaaccgcctctccccgcgcgttggccgattcattaatgcagctggcacgacaggtttcccgactggaaagcgggcagtgagcgcaacgcaattaatgtgagttagctcactcattaggcaccccaggctttacactttatgcttccggctcgtatgttgtgtggaattgtgagcggataacaatttcacacaggaaacagctatgaccatgattacgccagatttaattaag

SEQ ID NO: 612 - DNA, 4910 bp, Artificial Sequence
  Description of Artificial Sequence: Synthetic polynucleotide
gccttaattaggctgcgcgctcgctcgctcactgaggccgcccgggcaaagcccgggcgtcgggcgacctttggtcgcccggcctcagtgagcgagcgagcgcgcagagagggagtggccaactccatcactaggggttccttgtagttaatgattaacccgccatgctacttatctaccagggtaatggggatcctctagaactataggttgacattgattattgactagttattaatagtaatcaattacggggtcattagttcatagcccatatatggagttccgcgttacataacttacggtaaatggcccgcctggctgaccgcccaacgacccccgcccattgacgtcaataatgacgtatgttcccatagtaacgccaatagggactttccattgacgtcaatgggtggagtatttacggtaaactgcccacttggcagtacatcaagtgtatcatatgccaagtacgccccctattgacgtcaatgacggtaaatggcccgcctggcattatgcccagtacatgaccttatgggactttcctacttggcagtacatctacgtattagtcatcgctattaccatggtgatgcggttttggcagtacatcaatgggcgtggatagcggtttgactcacggggatttccaagtctccaccccattgacgtcaatgggagtttgttttggcaccaaaatcaacgggactttccaaaatgtcgtaacaactccgccccattgacgcaaatgggcggtaggcgtgtacggtgggaggtctatataagcagagctctctggctaactagagaacccactgcttactggcttatcgaaattaatacgactcactatagggagacccaagctggctagcgtttaaacttcgggagcaagcttgaactgaaaaaccagaaagttaactggtaagtttagtctttttgtcttttatttcaggtcccggatccggtggtggtgcaaatcaaagaactgctcctcagtggatgttgcctttacttctaggcctgtacggaagtgttacttctgctctaaaagctgcggaattgtacccgcggccgatccaccggtatgtggactctgggtcgcagagcggtggcaggcttgctggcatctccgtccccggctcaggcccagaccctgacacgggtgcccaggccggccgagctggctcctctgtgcggccggcgcggccttagaacagacattgacgcaacctgcacccccagaagagccagttccaaccagcgcgggttgaatcagatctggaacgtcaagaagcagagtgtgtaccttatgaatctccggaaaagtggcaccctcggacaccccggatccctcgatgaaaccacttatgagcgcctggccgaggaaaccctggattccctggctgagttcttcgaggacctggctgacaaaccctacaccttcgaagactacgacgtttccttcggaagtggggtgctgacggtcaaacttggtggcgatcttggaacctatgttataaacaagcagactcccaacaaacagatctggctcagctctccaagttcaggacccaagaggtatgactggacgggcaagaattgggtctattctcacgacggagtgagccttcatgaactgttggctgccgaactgacaaaagcccttaagacgaaactggacctgtcctcattggcgtactctggtaaggatgcctaactcgaggacggggtgaactacgcctgaggatccgatctttttccctctgccaaaaattatggggacatcatgaagccccttgagcatctgacttctggctaataaaggaaatttattttcattgcaatagtgtgttggaattttttgtgtctctcactcggaagcaattcgttgatctgaatttcgaccacccataatacccattaccctggtagataagtagcatggcgggttaatcattaactacaaggaacccctagtgatggagttggccactccctctctgcgcgctcgctcgctcactgaggccgggcgaccaaaggtcgcccgacgcccgggctttgcccgggcggcctcagtgagcgagcgagcgcgcagccttaattaacctaattcactggccgtcgttttacaacgtcgtgactgggaaaaccctggcgttacccaacttaatcgccttgcagcacatccccctttcgccagctggcgtaatagcgaagaggcccgcaccgatcgcccttcccaacagttgcgcagcctgaatggcgaatgggacgcgccctgtagcggcgcattaagcgcggcgggtgtggtggttacgcgcagcgtgaccgctacacttgccagcgccctagcgcccgctcctttcgctttcttcccttcctttctcgccacgttcgccggctttccccgtcaagctctaaatcgggggctccctttagggttccgatttagtgctttacggcacctcgaccccaaaaaacttgattagggtgatggttcacgtagtgggccatcgccctgatagacggtttttcgccctttgacgttggagtccacgttctttaatagtggactcttgttccaaactggaacaacactcaaccctatctcggtctattcttttgatttataagggattttgccgatttcggcctattggttaaaaaatgagctgatttaacaaaaatttaacgcgaattttaacaaaatattaacgcttacaatttaggtggcacttttcggggaaatgtgcgcggaacccctatttgtttatttttctaaatacattcaaatatgtatccgctcatgagacaataaccctgataaatgcttcaataatattgaaaaaggaagagtatgagtattcaacatttccgtgtcgcccttattcccttttttgcggcattttgccttcctgtttttgctcacccagaaacgctggtgaaagtaaaagatgctgaagatcagttgggtgcacgagtgggttacatcgaactggatctcaacagcggtaagatccttgagagttttcgccccgaagaacgttttccaatgatgagcacttttaaagttctgctatgtggcgcggtattatcccgtattgacgccgggcaagagcaactcggtcgccgcatacactattctcagaatgacttggttgagtactcaccagtcacagaaaagcatcttacggatggcatgacagtaagagaattatgcagtgctgccataaccatgagtgataacactgcggccaacttacttctgacaacgatcggaggaccgaaggagctaaccgcttttttgcacaacatgggggatcatgtaactcgccttgatcgttgggaaccggagctgaatgaagccataccaaacgacgagcgtgacaccacgatgcctgtagcaatggcaacaacgttgcgcaaactattaactggcgaactacttactctagcttcccggcaacaattaatagactggatggaggcggataaagttgcaggaccacttctgcgctcggcccttccggctggctggtttattgctgataaatctggagccggtgagcgtgggtctcgcggtatcattgcagcactggggccagatggtaagccctcccgtatcgtagttatctacacgacggggagtcaggcaactatggatgaacgaaatagacagatcgctgagataggtgcctcactgattaagcattggtaactgtcagaccaagtttactcatatatactttagattgatttaaaacttcatttttaatttaaaaggatctaggtgaagatcctttttgataatctcatgaccaaaatcccttaacgtgagttttcgttccactgagcgtcagaccccgtagaaaagatcaaaggatcttcttgagatcctttttttctgcgcgtaatctgctgcttgcaaacaaaaaaaccaccgctaccagcggtggtttgtttgccggatcaagagctaccaactctttttccgaaggtaactggcttcagcagagcgcagataccaaatactgttcttctagtgtagccgtagttaggccaccacttcaagaactctgtagcaccgcctacatacctcgctctgctaatcctgttaccagtggctgctgccagtggcgataagtcgtgtcttaccgggttggactcaagacgatagttaccggataaggcgcagcggtcgggctgaacggggggttcgtgcacacagcccagcttggagcgaacgacctacaccgaactgagatacctacagcgtgagctatgagaaagcgccacgcttcccgaagggagaaaggcggacaggtatccggtaagcggcagggtcggaacaggagagcgcacgagggagcttccagggggaaacgcctggtatctttatagtcctgtcgggtttcgccacctctgacttgagcgtcgatttttgtgatgctcgtcaggggggcggagcctatggaaaaacgccagcaacgcggcctttttacggttcctggccttttgctggccttttgctcacatgttctttcctgcgttatcccctgattctgtggataaccgtattaccgcctttgagtgagctgataccgctcgccgcagccgaacgaccgagcgcagcgagtcagtgagcgaggaagcggaagagcgcccaatacgcaaaccgcctctccccgcgcgttggccgattcattaatgcagctggcacgacaggtttcccgactggaaagcgggcagtgagcgcaacgcaattaatgtgagttagctcactcattaggcaccccaggctttacactttatgcttccggctcgtatgttgtgtggaattgtgagcggataacaatttcacacaggaaacagctatgaccatgattacgccagatttaattaag

SEQ ID NO: 613 - DNA, 4910 bp, Artificial Sequence
  Description of Artificial Sequence: Synthetic polynucleotide
gccttaattaggctgcgcgctcgctcgctcactgaggccgcccgggcaaagcccgggcgtcgggcgacctttggtcgcccggcctcagtgagcgagcgagcgcgcagagagggagtggccaactccatcactaggggttccttgtagttaatgattaacccgccatgctacttatctaccagggtaatggggatcctctagaactataggttgacattgattattgactagttattaatagtaatcaattacggggtcattagttcatagcccatatatggagttccgcgttacataacttacggtaaatggcccgcctggctgaccgcccaacgacccccgcccattgacgtcaataatgacgtatgttcccatagtaacgccaatagggactttccattgacgtcaatgggtggagtatttacggtaaactgcccacttggcagtacatcaagtgtatcatatgccaagtacgccccctattgacgtcaatgacggtaaatggcccgcctggcattatgcccagtacatgaccttatgggactttcctacttggcagtacatctacgtattagtcatcgctattaccatggtgatgcggttttggcagtacatcaatgggcgtggatagcggtttgactcacggggatttccaagtctccaccccattgacgtcaatgggagtttgttttggcaccaaaatcaacgggactttccaaaatgtcgtaacaactccgccccattgacgcaaatgggcggtaggcgtgtacggtgggaggtctatataagcagagctctctggctaactagagaacccactgcttactggcttatcgaaattaatacgactcactatagggagacccaagctggctagcgtttaaacttcgggagcaagcttgaactgaaaaaccagaaagttaactggtaagtttagtctttttgtcttttatttcaggtcccggatccggtggtggtgcaaatcaaagaactgctcctcagtggatgttgcctttacttctaggcctgtacggaagtgttacttctgctctaaaagctgcggaattgtacccgcggccgatccaccggtatgtggactctggggaggcgcgccgttgccggactcctggcatctccaagcccagcgcaggctcaaaccctcacgcgcgttcccaggccagccgagttggcccccctttgtggcaggcgcggcctgaggacagatatcgacgccacatgcactcctcgccgcgcctccagcaatcaaaggggtttgaaccaaatttggaacgtcaagaagcaatcagtgtatctcatgaatctgagaaagagcggcacactcggtcatcccggaagtctggacgaaaccacatacgaacggctcgccgaggaaacgctggatagcctggccgagtttttcgaggacctggctgataaaccgtatactttcgaagattatgacgtgtcattcgggagcggcgtactgaccgtcaaattgggcggtgacctggggacatacgtgattaacaagcagactcctaataaacagatttggttgagctctccttccagcgggcctaaacgctatgattggacagggaagaattgggtttacagtcacgacggagttagccttcacgagctcttggcagcggagctgacaaaggcgctcaagaccaaactcgacctgtcttcactcgcctattcaggcaaagacgcctgactcgaggacggggtgaactacgcctgaggatccgatctttttccctctgccaaaaattatggggacatcatgaagccccttgagcatctgacttctggctaataaaggaaatttattttcattgcaatagtgtgttggaattttttgtgtctctcactcggaagcaattcgttgatctgaatttcgaccacccataatacccattaccctggtagataagtagcatggcgggttaatcattaactacaaggaacccctagtgatggagttggccactccctctctgcgcgctcgctcgctcactgaggccgggcgaccaaaggtcgcccgacgcccgggctttgcccgggcggcctcagtgagcgagcgagcgcgcagccttaattaacctaattcactggccgtcgttttacaacgtcgtgactgggaaaaccctggcgttacccaacttaatcgccttgcagcacatccccctttcgccagctggcgtaatagcgaagaggcccgcaccgatcgcccttcccaacagttgcgcagcctgaatggcgaatgggacgcgccctgtagcggcgcattaagcgcggcgggtgtggtggttacgcgcagcgtgaccgctacacttgccagcgccctagcgcccgctcctttcgctttcttcccttcctttctcgccacgttcgccggctttccccgtcaagctctaaatcgggggctccctttagggttccgatttagtgctttacggcacctcgaccccaaaaaacttgattagggtgatggttcacgtagtgggccatcgccctgatagacggtttttcgccctttgacgttggagtccacgttctttaatagtggactcttgttccaaactggaacaacactcaaccctatctcggtctattcttttgatttataagggattttgccgatttcggcctattggttaaaaaatgagctgatttaacaaaaatttaacgcgaattttaacaaaatattaacgcttacaatttaggtggcacttttcggggaaatgtgcgcggaacccctatttgtttatttttctaaatacattcaaatatgtatccgctcatgagacaataaccctgataaatgcttcaataatattgaaaaaggaagagtatgagtattcaacatttccgtgtcgcccttattcccttttttgcggcattttgccttcctgtttttgctcacccagaaacgctggtgaaagtaaaagatgctgaagatcagttgggtgcacgagtgggttacatcgaactggatctcaacagcggtaagatccttgagagttttcgccccgaagaacgttttccaatgatgagcacttttaaagttctgctatgtggcgcggtattatcccgtattgacgccgggcaagagcaactcggtcgccgcatacactattctcagaatgacttggttgagtactcaccagtcacagaaaagcatcttacggatggcatgacagtaagagaattatgcagtgctgccataaccatgagtgataacactgcggccaacttacttctgacaacgatcggaggaccgaaggagctaaccgcttttttgcacaacatgggggatcatgtaactcgccttgatcgttgggaaccggagctgaatgaagccataccaaacgacgagcgtgacaccacgatgcctgtagcaatggcaacaacgttgcgcaaactattaactggcgaactacttactctagcttcccggcaacaattaatagactggatggaggcggataaagttgcaggaccacttctgcgctcggcccttccggctggctggtttattgctgataaatctggagccggtgagcgtgggtctcgcggtatcattgcagcactggggccagatggtaagccctcccgtatcgtagttatctacacgacggggagtcaggcaactatggatgaacgaaatagacagatcgctgagataggtgcctcactgattaagcattggtaactgtcagaccaagtttactcatatatactttagattgatttaaaacttcatttttaatttaaaaggatctaggtgaagatcctttttgataatctcatgaccaaaatcccttaacgtgagttttcgttccactgagcgtcagaccccgtagaaaagatcaaaggatcttcttgagatcctttttttctgcgcgtaatctgctgcttgcaaacaaaaaaaccaccgctaccagcggtggtttgtttgccggatcaagagctaccaactctttttccgaaggtaactggcttcagcagagcgcagataccaaatactgttcttctagtgtagccgtagttaggccaccacttcaagaactctgtagcaccgcctacatacctcgctctgctaatcctgttaccagtggctgctgccagtggcgataagtcgtgtcttaccgggttggactcaagacgatagttaccggataaggcgcagcggtcgggctgaacggggggttcgtgcacacagcccagcttggagcgaacgacctacaccgaactgagatacctacagcgtgagctatgagaaagcgccacgcttcccgaagggagaaaggcggacaggtatccggtaagcggcagggtcggaacaggagagcgcacgagggagcttccagggggaaacgcctggtatctttatagtcctgtcgggtttcgccacctctgacttgagcgtcgatttttgtgatgctcgtcaggggggcggagcctatggaaaaacgccagcaacgcggcctttttacggttcctggccttttgctggccttttgctcacatgttctttcctgcgttatcccctgattctgtggataaccgtattaccgcctttgagtgagctgataccgctcgccgcagccgaacgaccgagcgcagcgagtcagtgagcgaggaagcggaagagcgcccaatacgcaaaccgcctctccccgcgcgttggccgattcattaatgcagctggcacgacaggtttcccgactggaaagcgggcagtgagcgcaacgcaattaatgtgagttagctcactcattaggcaccccaggctttacactttatgcttccggctcgtatgttgtgtggaattgtgagcggataacaatttcacacaggaaacagctatgaccatgattacgccagatttaattaag

SEQ ID NO: 614 - DNA, 4910 bp, Artificial Sequence
  Description of Artificial Sequence: Synthetic polynucleotide
gccttaattaggctgcgcgctcgctcgctcactgaggccgcccgggcaaagcccgggcgtcgggcgacctttggtcgcccggcctcagtgagcgagcgagcgcgcagagagggagtggccaactccatcactaggggttccttgtagttaatgattaacccgccatgctacttatctaccagggtaatggggatcctctagaactataggttgacattgattattgactagttattaatagtaatcaattacggggtcattagttcatagcccatatatggagttccgcgttacataacttacggtaaatggcccgcctggctgaccgcccaacgacccccgcccattgacgtcaataatgacgtatgttcccatagtaacgccaatagggactttccattgacgtcaatgggtggagtatttacggtaaactgcccacttggcagtacatcaagtgtatcatatgccaagtacgccccctattgacgtcaatgacggtaaatggcccgcctggcattatgcccagtacatgaccttatgggactttcctacttggcagtacatctacgtattagtcatcgctattaccatggtgatgcggttttggcagtacatcaatgggcgtggatagcggtttgactcacggggatttccaagtctccaccccattgacgtcaatgggagtttgttttggcaccaaaatcaacgggactttccaaaatgtcgtaacaactccgccccattgacgcaaatgggcggtaggcgtgtacggtgggaggtctatataagcagagctctctggctaactagagaacccactgcttactggcttatcgaaattaatacgactcactatagggagacccaagctggctagcgtttaaacttcgggagcaagcttgaactgaaaaaccagaaagttaactggtaagtttagtctttttgtcttttatttcaggtcccggatccggtggtggtgcaaatcaaagaactgctcctcagtggatgttgcctttacttctaggcctgtacggaagtgttacttctgctctaaaagctgcggaattgtacccgcggccgatccaccggtatgtggacactcgggcgacgcgccgtggctgggctgcttgcttccccaagtcccgcacaggcgcaaaccctcacaagggtcccacggccagctgaattggccccgctgtgcggtcggaggggcctgcgaacagatatagacgcaacgtgcacccccagaagagcaagcagcaaccagagaggcctcaatcagatttggaacgtcaagaaacagagtgtctatctgatgaacctccgcaaatcagggacccttggtcatccgggatctcttgatgaaacgacctatgaacggctggctgaggagacgcttgactccctggcagagttcttcgaggatctggctgataagccatacacgttcgaggactatgatgtttcttttggttctggcgtcctgacggtgaaactcggaggggatctgggcacttacgttatcaacaaacagactcccaataaacagatttggttgtctagtcctagcagtggcccaaaacgctatgactggacgggcaagaactgggtgtactcccacgatggagttagcctgcacgaacttctggccgctgagcttactaaagcgctgaagactaagctggatctctccagcctcgcatacagcggcaaagacgcctagctcgaggacggggtgaactacgcctgaggatccgatctttttccctctgccaaaaattatggggacatcatgaagccccttgagcatctgacttctggctaataaaggaaatttattttcattgcaatagtgtgttggaattttttgtgtctctcactcggaagcaattcgttgatctgaatttcgaccacccataatacccattaccctggtagataagtagcatggcgggttaatcattaactacaaggaacccctagtgatggagttggccactccctctctgcgcgctcgctcgctcactgaggccgggcgaccaaaggtcgcccgacgcccgggctttgcccgggcggcctcagtgagcgagcgagcgcgcagccttaattaacctaattcactggccgtcgttttacaacgtcgtgactgggaaaaccctggcgttacccaacttaatcgccttgcagcacatccccctttcgccagctggcgtaatagcgaagaggcccgcaccgatcgcccttcccaacagttgcgcagcctgaatggcgaatgggacgcgccctgtagcggcgcattaagcgcggcgggtgtggtggttacgcgcagcgtgaccgctacacttgccagcgccctagcgcccgctcctttcgctttcttcccttcctttctcgccacgttcgccggctttccccgtcaagctctaaatcgggggctccctttagggttccgatttagtgctttacggcacctcgaccccaaaaaacttgattagggtgatggttcacgtagtgggccatcgccctgatagacggtttttcgccctttgacgttggagtccacgttctttaatagtggactcttgttccaaactggaacaacactcaaccctatctcggtctattcttttgatttataagggattttgccgatttcggcctattggttaaaaaatgagctgatttaacaaaaatttaacgcgaattttaacaaaatattaacgcttacaatttaggtggcacttttcggggaaatgtgcgcggaacccctatttgtttatttttctaaatacattcaaatatgtatccgctcatgagacaataaccctgataaatgcttcaataatattgaaaaaggaagagtatgagtattcaacatttccgtgtcgcccttattcccttttttgcggcattttgccttcctgtttttgctcacccagaaacgctggtgaaagtaaaagatgctgaagatcagttgggtgcacgagtgggttacatcgaactggatctcaacagcggtaagatccttgagagttttcgccccgaagaacgttttccaatgatgagcacttttaaagttctgctatgtggcgcggtattatcccgtattgacgccgggcaagagcaactcggtcgccgcatacactattctcagaatgacttggttgagtactcaccagtcacagaaaagcatcttacggatggcatgacagtaagagaattatgcagtgctgccataaccatgagtgataacactgcggccaacttacttctgacaacgatcggaggaccgaaggagctaaccgcttttttgcacaacatgggggatcatgtaactcgccttgatcgttgggaaccggagctgaatgaagccataccaaacgacgagcgtgacaccacgatgcctgtagcaatggcaacaacgttgcgcaaactattaactggcgaactacttactctagcttcccggcaacaattaatagactggatggaggcggataaagttgcaggaccacttctgcgctcggcccttccggctggctggtttattgctgataaatctggagccggtgagcgtgggtctcgcggtatcattgcagcactggggccagatggtaagccctcccgtatcgtagttatctacacgacggggagtcaggcaactatggatgaacgaaatagacagatcgctgagataggtgcctcactgattaagcattggtaactgtcagaccaagtttactcatatatactttagattgatttaaaacttcatttttaatttaaaaggatctaggtgaagatcctttttgataatctcatgaccaaaatcccttaacgtgagttttcgttccactgagcgtcagaccccgtagaaaagatcaaaggatcttcttgagatcctttttttctgcgcgtaatctgctgcttgcaaacaaaaaaaccaccgctaccagcggtggtttgtttgccggatcaagagctaccaactctttttccgaaggtaactggcttcagcagagcgcagataccaaatactgttcttctagtgtagccgtagttaggccaccacttcaagaactctgtagcaccgcctacatacctcgctctgctaatcctgttaccagtggctgctgccagtggcgataagtcgtgtcttaccgggttggactcaagacgatagttaccggataaggcgcagcggtcgggctgaacggggggttcgtgcacacagcccagcttggagcgaacgacctacaccgaactgagatacctacagcgtgagctatgagaaagcgccacgcttcccgaagggagaaaggcggacaggtatccggtaagcggcagggtcggaacaggagagcgcacgagggagcttccagggggaaacgcctggtatctttatagtcctgtcgggtttcgccacctctgacttgagcgtcgatttttgtgatgctcgtcaggggggcggagcctatggaaaaacgccagcaacgcggcctttttacggttcctggccttttgctggccttttgctcacatgttctttcctgcgttatcccctgattctgtggataaccgtattaccgcctttgagtgagctgataccgctcgccgcagccgaacgaccgagcgcagcgagtcagtgagcgaggaagcggaagagcgcccaatacgcaaaccgcctctccccgcgcgttggccgattcattaatgcagctggcacgacaggtttcccgactggaaagcgggcagtgagcgcaacgcaattaatgtgagttagctcactcattaggcaccccaggctttacactttatgcttccggctcgtatgttgtgtggaattgtgagcggataacaatttcacacaggaaacagctatgaccatgattacgccagatttaattaag

SEQ ID NO: 615 - DNA, 4910 bp, Artificial Sequence
  Description of Artificial Sequence: Synthetic polynucleotide
gccttaattaggctgcgcgctcgctcgctcactgaggccgcccgggcaaagcccgggcgtcgggcgacctttggtcgcccggcctcagtgagcgagcgagcgcgcagagagggagtggccaactccatcactaggggttccttgtagttaatgattaacccgccatgctacttatctaccagggtaatggggatcctctagaactataggttgacattgattattgactagttattaatagtaatcaattacggggtcattagttcatagcccatatatggagttccgcgttacataacttacggtaaatggcccgcctggctgaccgcccaacgacccccgcccattgacgtcaataatgacgtatgttcccatagtaacgccaatagggactttccattgacgtcaatgggtggagtatttacggtaaactgcccacttggcagtacatcaagtgtatcatatgccaagtacgccccctattgacgtcaatgacggtaaatggcccgcctggcattatgcccagtacatgaccttatgggactttcctacttggcagtacatctacgtattagtcatcgctattaccatggtgatgcggttttggcagtacatcaatgggcgtggatagcggtttgactcacggggatttccaagtctccaccccattgacgtcaatgggagtttgttttggcaccaaaatcaacgggactttccaaaatgtcgtaacaactccgccccattgacgcaaatgggcggtaggcgtgtacggtgggaggtctatataagcagagctctctggctaactagagaacccactgcttactggcttatcgaaattaatacgactcactatagggagacccaagctggctagcgtttaaacttcgggagcaagcttgaactgaaaaaccagaaagttaactggtaagtttagtctttttgtcttttatttcaggtcccggatccggtggtggtgcaaatcaaagaactgctcctcagtggatgttgcctttacttctaggcctgtacggaagtgttacttctgctctaaaagctgcggaattgtacccgcggccgatccaccggtatgtggactctgggtcgacgcgccgtagccggtctcttggcctccccatcccctgcgcaggcacagacccttacacgagttccacggcccgctgaactggcaccactctgcggacgccggggcctgagaaccgatattgacgctacgtgcactccccgacgagcctcttctaatcagagggggctcaaccagatctggaacgtgaagaagcagtcagtctacttgatgaatctgagaaagagcgggacccttgggcaccccgggtctctcgacgagactacatacgagaggctggccgaggagactttggactctctcgccgaattcttcgaggatttggcagacaagccgtacacctttgaagactacgatgtctcattcggatcaggggtgctgacggttaaactggggggcgatctcggaacctacgtcataaacaaacagacacccaataagcagatctggttgtctagcccatcatccggtcctaaacggtacgactggaccggcaagaactgggtctactcccatgacggagtcagtcttcatgaactgcttgccgcagagctgaccaaggctcttaagacgaaactggatctctctagcctggcctactccgggaaggatgcatagctcgaggacggggtgaactacgcctgaggatccgatctttttccctctgccaaaaattatggggacatcatgaagccccttgagcatctgacttctggctaataaaggaaatttattttcattgcaatagtgtgttggaattttttgtgtctctcactcggaagcaattcgttgatctgaatttcgaccacccataatacccattaccctggtagataagtagcatggcgggttaatcattaactacaaggaacccctagtgatggagttggccactccctctctgcgcgctcgctcgctcactgaggccgggcgaccaaaggtcgcccgacgcccgggctttgcccgggcggcctcagtgagcgagcgagcgcgcagccttaattaacctaattcactggccgtcgttttacaacgtcgtgactgggaaaaccctggcgttacccaacttaatcgccttgcagcacatccccctttcgccagctggcgtaatagcgaagaggcccgcaccgatcgcccttcccaacagttgcgcagcctgaatggcgaatgggacgcgccctgtagcggcgcattaagcgcggcgggtgtggtggttacgcgcagcgtgaccgctacacttgccagcgccctagcgcccgctcctttcgctttcttcccttcctttctcgccacgttcgccggctttccccgtcaagctctaaatcgggggctccctttagggttccgatttagtgctttacggcacctcgaccccaaaaaacttgattagggtgatggttcacgtagtgggccatcgccctgatagacggtttttcgccctttgacgttggagtccacgttctttaatagtggactcttgttccaaactggaacaacactcaaccctatctcggtctattcttttgatttataagggattttgccgatttcggcctattggttaaaaaatgagctgatttaacaaaaatttaacgcgaattttaacaaaatattaacgcttacaatttaggtggcacttttcggggaaatgtgcgcggaacccctatttgtttatttttctaaatacattcaaatatgtatccgctcatgagacaataaccctgataaatgcttcaataatattgaaaaaggaagagtatgagtattcaacatttccgtgtcgcccttattcccttttttgcggcattttgccttcctgtttttgctcacccagaaacgctggtgaaagtaaaagatgctgaagatcagttgggtgcacgagtgggttacatcgaactggatctcaacagcggtaagatccttgagagttttcgccccgaagaacgttttccaatgatgagcacttttaaagttctgctatgtggcgcggtattatcccgtattgacgccgggcaagagcaactcggtcgccgcatacactattctcagaatgacttggttgagtactcaccagtcacagaaaagcatcttacggatggcatgacagtaagagaattatgcagtgctgccataaccatgagtgataacactgcggccaacttacttctgacaacgatcggaggaccgaaggagctaaccgcttttttgcacaacatgggggatcatgtaactcgccttgatcgttgggaaccggagctgaatgaagccataccaaacgacgagcgtgacaccacgatgcctgtagcaatggcaacaacgttgcgcaaactattaactggcgaactacttactctagcttcccggcaacaattaatagactggatggaggcggataaagttgcaggaccacttctgcgctcggcccttccggctggctggtttattgctgataaatctggagccggtgagcgtgggtctcgcggtatcattgcagcactggggccagatggtaagccctcccgtatcgtagttatctacacgacggggagtcaggcaactatggatgaacgaaatagacagatcgctgagataggtgcctcactgattaagcattggtaactgtcagaccaagtttactcatatatactttagattgatttaaaacttcatttttaatttaaaaggatctaggtgaagatcctttttgataatctcatgaccaaaatcccttaacgtgagttttcgttccactgagcgtcagaccccgtagaaaagatcaaaggatcttcttgagatcctttttttctgcgcgtaatctgctgcttgcaaacaaaaaaaccaccgctaccagcggtggtttgtttgccggatcaagagctaccaactctttttccgaaggtaactggcttcagcagagcgcagataccaaatactgttcttctagtgtagccgtagttaggccaccacttcaagaactctgtagcaccgcctacatacctcgctctgctaatcctgttaccagtggctgctgccagtggcgataagtcgtgtcttaccgggttggactcaagacgatagttaccggataaggcgcagcggtcgggctgaacggggggttcgtgcacacagcccagcttggagcgaacgacctacaccgaactgagatacctacagcgtgagctatgagaaagcgccacgcttcccgaagggagaaaggcggacaggtatccggtaagcggcagggtcggaacaggagagcgcacgagggagcttccagggggaaacgcctggtatctttatagtcctgtcgggtttcgccacctctgacttgagcgtcgatttttgtgatgctcgtcaggggggcggagcctatggaaaaacgccagcaacgcggcctttttacggttcctggccttttgctggccttttgctcacatgttctttcctgcgttatcccctgattctgtggataaccgtattaccgcctttgagtgagctgataccgctcgccgcagccgaacgaccgagcgcagcgagtcagtgagcgaggaagcggaagagcgcccaatacgcaaaccgcctctccccgcgcgttggccgattcattaatgcagctggcacgacaggtttcccgactggaaagcgggcagtgagcgcaacgcaattaatgtgagttagctcactcattaggcaccccaggctttacactttatgcttccggctcgtatgttgtgtggaattgtgagcggataacaatttcacacaggaaacagctatgaccatgattacgccagatttaattaag

SEQ ID NO: 616 - DNA, 4919 bp, Artificial Sequence
  Description of Artificial Sequence: Synthetic polynucleotide
gccttaattaggctgcgcgctcgctcgctcactgaggccgcccgggcaaagcccgggcgtcgggcgacctttggtcgcccggcctcagtgagcgagcgagcgcgcagagagggagtggccaactccatcactaggggttccttgtagttaatgattaacccgccatgctacttatctaccagggtaatggggatcctctagaactataggttgacattgattattgactagttattaatagtaatcaattacggggtcattagttcatagcccatatatggagttccgcgttacataacttacggtaaatggcccgcctggctgaccgcccaacgacccccgcccattgacgtcaataatgacgtatgttcccatagtaacgccaatagggactttccattgacgtcaatgggtggagtatttacggtaaactgcccacttggcagtacatcaagtgtatcatatgccaagtacgccccctattgacgtcaatgacggtaaatggcccgcctggcattatgcccagtacatgaccttatgggactttcctacttggcagtacatctacgtattagtcatcgctattaccatggtgatgcggttttggcagtacatcaatgggcgtggatagcggtttgactcacggggatttccaagtctccaccccattgacgtcaatgggagtttgttttggcaccaaaatcaacgggactttccaaaatgtcgtaacaactccgccccattgacgcaaatgggcggtaggcgtgtacggtgggaggtctatataagcagagctctctggctaactagagaacccactgcttactggcttatcgaaattaatacgactcactatagggagacccaagctggctagcgtttaaacttcgggagcaagcttgaactgaaaaaccagaaagttaactggtaagtttagtctttttgtcttttatttcaggtcccggatccggtggtggtgcaaatcaaagaactgctcctcagtggatgttgcctttacttctaggcctgtacggaagtgttacttctgctctaaaagctgcggaattgtacccgcggccgatccaccggtgccgccaccatgtggactctcgggcgccgcgcagtagccggcctcctggcgtcacccagcccagcccaggcccagaccctcacccgggtcccgcggccggcagagttggccccactctgcggccgccgtggcctgcgcaccgacatcgatgcgacctgcacgccccgccgcgcaagttcgaaccaacgtggcctcaaccagatttggaatgtcaaaaagcagagtgtctatttgatgaatttgaggaaatctggaactttgggccacccaggctctctagatgagaccacctatgaaagactagcagaggaaacgctggactctttagcagagttttttgaagaccttgcagacaagccatacacgtttgaggactatgatgtctcctttgggagtggtgtcttaactgtcaaactgggtggagatctaggaacctatgtgatcaacaagcagacgccaaacaagcaaatctggctatcttctccatccagtggacctaagcgttatgactggactgggaaaaactgggtgtactcccacgacggcgtgtccctccatgagctgctggccgcagagctcactaaagccttaaaaaccaaactggacttgtcttccttggcctattccggaaaagatgcttgactcgaggacggggtgaactacgcctgaggatccgatctttttccctctgccaaaaattatggggacatcatgaagccccttgagcatctgacttctggctaataaaggaaatttattttcattgcaatagtgtgttggaattttttgtgtctctcactcggaagcaattcgttgatctgaatttcgaccacccataatacccattaccctggtagataagtagcatggcgggttaatcattaactacaaggaacccctagtgatggagttggccactccctctctgcgcgctcgctcgctcactgaggccgggcgaccaaaggtcgcccgacgcccgggctttgcccgggcggcctcagtgagcgagcgagcgcgcagccttaattaacctaattcactggccgtcgttttacaacgtcgtgactgggaaaaccctggcgttacccaacttaatcgccttgcagcacatccccctttcgccagctggcgtaatagcgaagaggcccgcaccgatcgcccttcccaacagttgcgcagcctgaatggcgaatgggacgcgccctgtagcggcgcattaagcgcggcgggtgtggtggttacgcgcagcgtgaccgctacacttgccagcgccctagcgcccgctcctttcgctttcttcccttcctttctcgccacgttcgccggctttccccgtcaagctctaaatcgggggctccctttagggttccgatttagtgctttacggcacctcgaccccaaaaaacttgattagggtgatggttcacgtagtgggccatcgccctgatagacggtttttcgccctttgacgttggagtccacgttctttaatagtggactcttgttccaaactggaacaacactcaaccctatctcggtctattcttttgatttataagggattttgccgatttcggcctattggttaaaaaatgagctgatttaacaaaaatttaacgcgaattttaacaaaatattaacgcttacaatttaggtggcacttttcggggaaatgtgcgcggaacccctatttgtttatttttctaaatacattcaaatatgtatccgctcatgagacaataaccctgataaatgcttcaataatattgaaaaaggaagagtatgagtattcaacatttccgtgtcgcccttattcccttttttgcggcattttgccttcctgtttttgctcacccagaaacgctggtgaaagtaaaagatgctgaagatcagttgggtgcacgagtgggttacatcgaactggatctcaacagcggtaagatccttgagagttttcgccccgaagaacgttttccaatgatgagcacttttaaagttctgctatgtggcgcggtattatcccgtattgacgccgggcaagagcaactcggtcgccgcatacactattctcagaatgacttggttgagtactcaccagtcacagaaaagcatcttacggatggcatgacagtaagagaattatgcagtgctgccataaccatgagtgataacactgcggccaacttacttctgacaacgatcggaggaccgaaggagctaaccgcttttttgcacaacatgggggatcatgtaactcgccttgatcgttgggaaccggagctgaatgaagccataccaaacgacgagcgtgacaccacgatgcctgtagcaatggcaacaacgttgcgcaaactattaactggcgaactacttactctagcttcccggcaacaattaatagactggatggaggcggataaagttgcaggaccacttctgcgctcggcccttccggctggctggtttattgctgataaatctggagccggtgagcgtgggtctcgcggtatcattgcagcactggggccagatggtaagccctcccgtatcgtagttatctacacgacggggagtcaggcaactatggatgaacgaaatagacagatcgctgagataggtgcctcactgattaagcattggtaactgtcagaccaagtttactcatatatactttagattgatttaaaacttcatttttaatttaaaaggatctaggtgaagatcctttttgataatctcatgaccaaaatcccttaacgtgagttttcgttccactgagcgtcagaccccgtagaaaagatcaaaggatcttcttgagatcctttttttctgcgcgtaatctgctgcttgcaaacaaaaaaaccaccgctaccagcggtggtttgtttgccggatcaagagctaccaactctttttccgaaggtaactggcttcagcagagcgcagataccaaatactgttcttctagtgtagccgtagttaggccaccacttcaagaactctgtagcaccgcctacatacctcgctctgctaatcctgttaccagtggctgctgccagtggcgataagtcgtgtcttaccgggttggactcaagacgatagttaccggataaggcgcagcggtcgggctgaacggggggttcgtgcacacagcccagcttggagcgaacgacctacaccgaactgagatacctacagcgtgagctatgagaaagcgccacgcttcccgaagggagaaaggcggacaggtatccggtaagcggcagggtcggaacaggagagcgcacgagggagcttccagggggaaacgcctggtatctttatagtcctgtcgggtttcgccacctctgacttgagcgtcgatttttgtgatgctcgtcaggggggcggagcctatggaaaaacgccagcaacgcggcctttttacggttcctggccttttgctggccttttgctcacatgttctttcctgcgttatcccctgattctgtggataaccgtattaccgcctttgagtgagctgataccgctcgccgcagccgaacgaccgagcgcagcgagtcagtgagcgaggaagcggaagagcgcccaatacgcaaaccgcctctccccgcgcgttggccgattcattaatgcagctggcacgacaggtttcccgactggaaagcgggcagtgagcgcaacgcaattaatgtgagttagctcactcattaggcaccccaggctttacactttatgcttccggctcgtatgttgtgtggaattgtgagcggataacaatttcacacaggaaacagctatgaccatgattacgccagatttaattaag

SEQ ID NO: 617 - DNA, 5586 bp, Artificial Sequence
  Description of Artificial Sequence: Synthetic polynucleotide
gccttaattaggctgcgcgctcgctcgctcactgaggccgcccgggcaaagcccgggcgtcgggcgacctttggtcgcccggcctcagtgagcgagcgagcgcgcagagagggagtggccaactccatcactaggggttccttgtagttaatgattaacccgccatgctacttatctaccagggtaatggggatcctctagaactatagctagtcgacgagctcccaggctcaagtgatcctcccgcctcagcctcctgagtagctgagatcacaggcatgcactaccacactcggctcacatttgacatcctctaaagcatatataaaatgtgaagaaaactttcacaatttgcatccctttgtaatatgtaacagaaataaaattctcttttaaaatctatcaacaataggcaaggcacggtggctcacgcctgtcgtctcagcactttgtgaggcccaggcgggcagatcgtttgagcctagaagttcaagaccaccctgggcaacatagcgaaaccccctttctacaaaaaatacaaaaactagctgggtgtggtggtgcacacctgtagtcccagctacttggaaggctgaaatgggaagactgcttgagcccgggagggagaagttgcagtaagccaggaccacaccactgcactccagcctgggcaacagagtgagactctgtctcaaacaaacaaataaatgaggcgggtggatcacgaggtcagtagatcgagaccatcctggctaacacggtgaaacccgtctctactaaaaaaaaaaaaaaatacaaaaaattagccaggcatggtggcgggcgcctgtagtcccagttactcgggaggctgaggcaggagaatggcgtgaaaccgggaggcagagcttgcagtgagccgagatcgcaccactgccctccagcctgggcgacagagcgagactccgtctcaatcaatcaatcaatcaataaaatctattaacaatatttattgtgcacttaacaggaacatgccctgtccaaaaaaaactttacagggcttaactcattttatccttaccacaatcctatgaagtaggaacttttataaaacgcattttataaacaaggcacagagaggttaattaacttgccctctggtcacacagctaggaagtgggcagagtacagatttacacaaggcatccgtctcctggccccacatacccaactgctgtaaacccataccggcggccaagcagcctcaatttgtgcatgcacccacttcccagcaagacagcagctcccaagttcctcctgtttagaattttagaagcggcgggccaccaggctgcagtctcccttgggtcaggggtcctggttgcactccgtgctttgcacaaagcaggctctccatttttgttaaatgcacgaatagtgctaagctgggaagttcttcctgaggtctaacctctagctgctcccccacagaagagtgcctgcggccagtggccaccaggggtcgccgcagcacccagcgctggagggcggagcgggcggcagacccggagcagcaagtggactctctcgagaagcttgaactgaaaaaccagaaagttaactggtaagtttagtctttttgtcttttatttcaggtcccggatccggtggtggtgcaaatcaaagaactgctcctcagtggatgttgcctttacttctaggcctgtacggaagtgttacttctgctctaaaagctgcggaattgtacccgcggccgatccaccggtatgtggactctcgggcgccgcgcagtagccggcctcctggcgtcacccagcccagcccaggcccagaccctcacccgggtcccgcggccggcagagttggccccactctgcggccgccgtggcctgcgcaccgacatcgatgcgacctgcacgccccgccgcgcaagttcgaaccaacgtggcctcaaccagatttggaatgtcaaaaagcagagtgtctatttgatgaatttgaggaaatctggaactttgggccacccaggctctctagatgagaccacctatgaaagactagcagaggaaacgctggactctttagcagagttttttgaagaccttgcagacaagccatacacgtttgaggactatgatgtctcctttgggagtggtgtcttaactgtcaaactgggtggagatctaggaacctatgtgatcaacaagcagacgccaaacaagcaaatctggctatcttctccatccagtggacctaagcgttatgactggactgggaaaaactgggtgtactcccacgacggcgtgtccctccatgagctgctggccgcagagctcactaaagccttaaaaaccaaactggacttgtcttccttggcctattccggaaaagatgcttgactcgaggacggggtgaactacgcctgaggatccgatctttttccctctgccaaaaattatggggacatcatgaagccccttgagcatctgacttctggctaataaaggaaatttattttcattgcaatagtgtgttggaattttttgtgtctctcactcggaagcaattcgttgatctgaatttcgaccacccataatacccattaccctggtagataagtagcatggcgggttaatcattaactacaaggaacccctagtgatggagttggccactccctctctgcgcgctcgctcgctcactgaggccgggcgaccaaaggtcgcccgacgcccgggctttgcccgggcggcctcagtgagcgagcgagcgcgcagccttaattaacctaattcactggccgtcgttttacaacgtcgtgactgggaaaaccctggcgttacccaacttaatcgccttgcagcacatccccctttcgccagctggcgtaatagcgaagaggcccgcaccgatcgcccttcccaacagttgcgcagcctgaatggcgaatgggacgcgccctgtagcggcgcattaagcgcggcgggtgtggtggttacgcgcagcgtgaccgctacacttgccagcgccctagcgcccgctcctttcgctttcttcccttcctttctcgccacgttcgccggctttccccgtcaagctctaaatcgggggctccctttagggttccgatttagtgctttacggcacctcgaccccaaaaaacttgattagggtgatggttcacgtagtgggccatcgccctgatagacggtttttcgccctttgacgttggagtccacgttctttaatagtggactcttgttccaaactggaacaacactcaaccctatctcggtctattcttttgatttataagggattttgccgatttcggcctattggttaaaaaatgagctgatttaacaaaaatttaacgcgaattttaacaaaatattaacgcttacaatttaggtggcacttttcggggaaatgtgcgcggaacccctatttgtttatttttctaaatacattcaaatatgtatccgctcatgagacaataaccctgataaatgcttcaataatattgaaaaaggaagagtatgagtattcaacatttccgtgtcgcccttattcccttttttgcggcattttgccttcctgtttttgctcacccagaaacgctggtgaaagtaaaagatgctgaagatcagttgggtgcacgagtgggttacatcgaactggatctcaacagcggtaagatccttgagagttttcgccccgaagaacgttttccaatgatgagcacttttaaagttctgctatgtggcgcggtattatcccgtattgacgccgggcaagagcaactcggtcgccgcatacactattctcagaatgacttggttgagtactcaccagtcacagaaaagcatcttacggatggcatgacagtaagagaattatgcagtgctgccataaccatgagtgataacactgcggccaacttacttctgacaacgatcggaggaccgaaggagctaaccgcttttttgcacaacatgggggatcatgtaactcgccttgatcgttgggaaccggagctgaatgaagccataccaaacgacgagcgtgacaccacgatgcctgtagcaatggcaacaacgttgcgcaaactattaactggcgaactacttactctagcttcccggcaacaattaatagactggatggaggcggataaagttgcaggaccacttctgcgctcggcccttccggctggctggtttattgctgataaatctggagccggtgagcgtgggtctcgcggtatcattgcagcactggggccagatggtaagccctcccgtatcgtagttatctacacgacggggagtcaggcaactatggatgaacgaaatagacagatcgctgagataggtgcctcactgattaagcattggtaactgtcagaccaagtttactcatatatactttagattgatttaaaacttcatttttaatttaaaaggatctaggtgaagatcctttttgataatctcatgaccaaaatcccttaacgtgagttttcgttccactgagcgtcagaccccgtagaaaagatcaaaggatcttcttgagatcctttttttctgcgcgtaatctgctgcttgcaaacaaaaaaaccaccgctaccagcggtggtttgtttgccggatcaagagctaccaactctttttccgaaggtaactggcttcagcagagcgcagataccaaatactgttcttctagtgtagccgtagttaggccaccacttcaagaactctgtagcaccgcctacatacctcgctctgctaatcctgttaccagtggctgctgccagtggcgataagtcgtgtcttaccgggttggactcaagacgatagttaccggataaggcgcagcggtcgggctgaacggggggttcgtgcacacagcccagcttggagcgaacgacctacaccgaactgagatacctacagcgtgagctatgagaaagcgccacgcttcccgaagggagaaaggcggacaggtatccggtaagcggcagggtcggaacaggagagcgcacgagggagcttccagggggaaacgcctggtatctttatagtcctgtcgggtttcgccacctctgacttgagcgtcgatttttgtgatgctcgtcaggggggcggagcctatggaaaaacgccagcaacgcggcctttttacggttcctggccttttgctggccttttgctcacatgttctttcctgcgttatcccctgattctgtggataaccgtattaccgcctttgagtgagctgataccgctcgccgcagccgaacgaccgagcgcagcgagtcagtgagcgaggaagcggaagagcgcccaatacgcaaaccgcctctccccgcgcgttggccgattcattaatgcagctggcacgacaggtttcccgactggaaagcgggcagtgagcgcaacgcaattaatgtgagttagctcactcattaggcaccccaggctttacactttatgcttccggctcgtatgttgtgtggaattgtgagcggataacaatttcacacaggaaacagctatgaccatgattacgccagatttaattaag

SEQ ID NO: 618 - DNA, 5586 bp, Artificial Sequence
  Description of Artificial Sequence: Synthetic polynucleotide
gccttaattaggctgcgcgctcgctcgctcactgaggccgcccgggcaaagcccgggcgtcgggcgacctttggtcgcccggcctcagtgagcgagcgagcgcgcagagagggagtggccaactccatcactaggggttccttgtagttaatgattaacccgccatgctacttatctaccagggtaatggggatcctctagaactatagctagtcgacgagctcccaggctcaagtgatcctcccgcctcagcctcctgagtagctgagatcacaggcatgcactaccacactcggctcacatttgacatcctctaaagcatatataaaatgtgaagaaaactttcacaatttgcatccctttgtaatatgtaacagaaataaaattctcttttaaaatctatcaacaataggcaaggcacggtggctcacgcctgtcgtctcagcactttgtgaggcccaggcgggcagatcgtttgagcctagaagttcaagaccaccctgggcaacatagcgaaaccccctttctacaaaaaatacaaaaactagctgggtgtggtggtgcacacctgtagtcccagctacttggaaggctgaaatgggaagactgcttgagcccgggagggagaagttgcagtaagccaggaccacaccactgcactccagcctgggcaacagagtgagactctgtctcaaacaaacaaataaatgaggcgggtggatcacgaggtcagtagatcgagaccatcctggctaacacggtgaaacccgtctctactaaaaaaaaaaaaaaatacaaaaaattagccaggcatggtggcgggcgcctgtagtcccagttactcgggaggctgaggcaggagaatggcgtgaaaccgggaggcagagcttgcagtgagccgagatcgcaccactgccctccagcctgggcgacagagcgagactccgtctcaatcaatcaatcaatcaataaaatctattaacaatatttattgtgcacttaacaggaacatgccctgtccaaaaaaaactttacagggcttaactcattttatccttaccacaatcctatgaagtaggaacttttataaaacgcattttataaacaaggcacagagaggttaattaacttgccctctggtcacacagctaggaagtgggcagagtacagatttacacaaggcatccgtctcctggccccacatacccaactgctgtaaacccataccggcggccaagcagcctcaatttgtgcatgcacccacttcccagcaagacagcagctcccaagttcctcctgtttagaattttagaagcggcgggccaccaggctgcagtctcccttgggtcaggggtcctggttgcactccgtgctttgcacaaagcaggctctccatttttgttaaatgcacgaatagtgctaagctgggaagttcttcctgaggtctaacctctagctgctcccccacagaagagtgcctgcggccagtggccaccaggggtcgccgcagcacccagcgctggagggcggagcgggcggcagacccggagcagcaagtggactctctcgagaagcttgaactgaaaaaccagaaagttaactggtaagtttagtctttttgtcttttatttcaggtcccggatccggtggtggtgcaaatcaaagaactgctcctcagtggatgttgcctttacttctaggcctgtacggaagtgttacttctgctctaaaagctgcggaattgtacccgcggccgatccaccggtatgtggactctgggtcgcagagcggtggcaggcttgctggcatctccgtccccggctcaggcccagaccctgacacgggtgcccaggccggccgagctggctcctctgtgcggccggcgcggccttagaacagacattgacgcaacctgcacccccagaagagccagttccaaccagcgcgggttgaatcagatctggaacgtcaagaagcagagtgtgtaccttatgaatctccggaaaagtggcaccctcggacaccccggatccctcgatgaaaccacttatgagcgcctggccgaggaaaccctggattccctggctgagttcttcgaggacctggctgacaaaccctacaccttcgaagactacgacgtttccttcggaagtggggtgctgacggtcaaacttggtggcgatcttggaacctatgttataaacaagcagactcccaacaaacagatctggctcagctctccaagttcaggacccaagaggtatgactggacgggcaagaattgggtctattctcacgacggagtgagccttcatgaactgttggctgccgaactgacaaaagcccttaagacgaaactggacctgtcctcattggcgtactctggtaaggatgcctaactcgaggacggggtgaactacgcctgaggatccgatctttttccctctgccaaaaattatggggacatcatgaagccccttgagcatctgacttctggctaataaaggaaatttattttcattgcaatagtgtgttggaattttttgtgtctctcactcggaagcaattcgttgatctgaatttcgaccacccataatacccattaccctggtagataagtagcatggcgggttaatcattaactacaaggaacccctagtgatggagttggccactccctctctgcgcgctcgctcgctcactgaggccgggcgaccaaaggtcgcccgacgcccgggctttgcccgggcggcctcagtgagcgagcgagcgcgcagccttaattaacctaattcactggccgtcgttttacaacgtcgtgactgggaaaaccctggcgttacccaacttaatcgccttgcagcacatccccctttcgccagctggcgtaatagcgaagaggcccgcaccgatcgcccttcccaacagttgcgcagcctgaatggcgaatgggacgcgccctgtagcggcgcattaagcgcggcgggtgtggtggttacgcgcagcgtgaccgctacacttgccagcgccctagcgcccgctcctttcgctttcttcccttcctttctcgccacgttcgccggctttccccgtcaagctctaaatcgggggctccctttagggttccgatttagtgctttacggcacctcgaccccaaaaaacttgattagggtgatggttcacgtagtgggccatcgccctgatagacggtttttcgccctttgacgttggagtccacgttctttaatagtggactcttgttccaaactggaacaacactcaaccctatctcggtctattcttttgatttataagggattttgccgatttcggcctattggttaaaaaatgagctgatttaacaaaaatttaacgcgaattttaacaaaatattaacgcttacaatttaggtggcacttttcggggaaatgtgcgcggaacccctatttgtttatttttctaaatacattcaaatatgtatccgctcatgagacaataaccctgataaatgcttcaataatattgaaaaaggaagagtatgagtattcaacatttccgtgtcgcccttattcccttttttgcggcattttgccttcctgtttttgctcacccagaaacgctggtgaaagtaaaagatgctgaagatcagttgggtgcacgagtgggttacatcgaactggatctcaacagcggtaagatccttgagagttttcgccccgaagaacgttttccaatgatgagcacttttaaagttctgctatgtggcgcggtattatcccgtattgacgccgggcaagagcaactcggtcgccgcatacactattctcagaatgacttggttgagtactcaccagtcacagaaaagcatcttacggatggcatgacagtaagagaattatgcagtgctgccataaccatgagtgataacactgcggccaacttacttctgacaacgatcggaggaccgaaggagctaaccgcttttttgcacaacatgggggatcatgtaactcgccttgatcgttgggaaccggagctgaatgaagccataccaaacgacgagcgtgacaccacgatgcctgtagcaatggcaacaacgttgcgcaaactattaactggcgaactacttactctagcttcccggcaacaattaatagactggatggaggcggataaagttgcaggaccacttctgcgctcggcccttccggctggctggtttattgctgataaatctggagccggtgagcgtgggtctcgcggtatcattgcagcactggggccagatggtaagccctcccgtatcgtagttatctacacgacggggagtcaggcaactatggatgaacgaaatagacagatcgctgagataggtgcctcactgattaagcattggtaactgtcagaccaagtttactcatatatactttagattgatttaaaacttcatttttaatttaaaaggatctaggtgaagatcctttttgataatctcatgaccaaaatcccttaacgtgagttttcgttccactgagcgtcagaccccgtagaaaagatcaaaggatcttcttgagatcctttttttctgcgcgtaatctgctgcttgcaaacaaaaaaaccaccgctaccagcggtggtttgtttgccggatcaagagctaccaactctttttccgaaggtaactggcttcagcagagcgcagataccaaatactgttcttctagtgtagccgtagttaggccaccacttcaagaactctgtagcaccgcctacatacctcgctctgctaatcctgttaccagtggctgctgccagtggcgataagtcgtgtcttaccgggttggactcaagacgatagttaccggataaggcgcagcggtcgggctgaacggggggttcgtgcacacagcccagcttggagcgaacgacctacaccgaactgagatacctacagcgtgagctatgagaaagcgccacgcttcccgaagggagaaaggcggacaggtatccggtaagcggcagggtcggaacaggagagcgcacgagggagcttccagggggaaacgcctggtatctttatagtcctgtcgggtttcgccacctctgacttgagcgtcgatttttgtgatgctcgtcaggggggcggagcctatggaaaaacgccagcaacgcggcctttttacggttcctggccttttgctggccttttgctcacatgttctttcctgcgttatcccctgattctgtggataaccgtattaccgcctttgagtgagctgataccgctcgccgcagccgaacgaccgagcgcagcgagtcagtgagcgaggaagcggaagagcgcccaatacgcaaaccgcctctccccgcgcgttggccgattcattaatgcagctggcacgacaggtttcccgactggaaagcgggcagtgagcgcaacgcaattaatgtgagttagctcactcattaggcaccccaggctttacactttatgcttccggctcgtatgttgtgtggaattgtgagcggataacaatttcacacaggaaacagctatgaccatgattacgccagatttaattaag

SEQ ID NO: 619 - DNA, 5586 bp, Artificial Sequence
  Description of Artificial Sequence: Synthetic polynucleotide
gccttaattaggctgcgcgctcgctcgctcactgaggccgcccgggcaaagcccgggcgtcgggcgacctttggtcgcccggcctcagtgagcgagcgagcgcgcagagagggagtggccaactccatcactaggggttccttgtagttaatgattaacccgccatgctacttatctaccagggtaatggggatcctctagaactatagctagtcgacgagctcccaggctcaagtgatcctcccgcctcagcctcctgagtagctgagatcacaggcatgcactaccacactcggctcacatttgacatcctctaaagcatatataaaatgtgaagaaaactttcacaatttgcatccctttgtaatatgtaacagaaataaaattctcttttaaaatctatcaacaataggcaaggcacggtggctcacgcctgtcgtctcagcactttgtgaggcccaggcgggcagatcgtttgagcctagaagttcaagaccaccctgggcaacatagcgaaaccccctttctacaaaaaatacaaaaactagctgggtgtggtggtgcacacctgtagtcccagctacttggaaggctgaaatgggaagactgcttgagcccgggagggagaagttgcagtaagccaggaccacaccactgcactccagcctgggcaacagagtgagactctgtctcaaacaaacaaataaatgaggcgggtggatcacgaggtcagtagatcgagaccatcctggctaacacggtgaaacccgtctctactaaaaaaaaaaaaaaatacaaaaaattagccaggcatggtggcgggcgcctgtagtcccagttactcgggaggctgaggcaggagaatggcgtgaaaccgggaggcagagcttgcagtgagccgagatcgcaccactgccctccagcctgggcgacagagcgagactccgtctcaatcaatcaatcaatcaataaaatctattaacaatatttattgtgcacttaacaggaacatgccctgtccaaaaaaaactttacagggcttaactcattttatccttaccacaatcctatgaagtaggaacttttataaaacgcattttataaacaaggcacagagaggttaattaacttgccctctggtcacacagctaggaagtgggcagagtacagatttacacaaggcatccgtctcctggccccacatacccaactgctgtaaacccataccggcggccaagcagcctcaatttgtgcatgcacccacttcccagcaagacagcagctcccaagttcctcctgtttagaattttagaagcggcgggccaccaggctgcagtctcccttgggtcaggggtcctggttgcactccgtgctttgcacaaagcaggctctccatttttgttaaatgcacgaatagtgctaagctgggaagttcttcctgaggtctaacctctagctgctcccccacagaagagtgcctgcggccagtggccaccaggggtcgccgcagcacccagcgctggagggcggagcgggcggcagacccggagcagcaagtggactctctcgagaagcttgaactgaaaaaccagaaagttaactggtaagtttagtctttttgtcttttatttcaggtcccggatccggtggtggtgcaaatcaaagaactgctcctcagtggatgttgcctttacttctaggcctgtacggaagtgttacttctgctctaaaagctgcggaattgtacccgcggccgatccaccggtatgtggactctggggaggcgcgccgttgccggactcctggcatctccaagcccagcgcaggctcaaaccctcacgcgcgttcccaggccagccgagttggcccccctttgtggcaggcgcggcctgaggacagatatcgacgccacatgcactcctcgccgcgcctccagcaatcaaaggggtttgaaccaaatttggaacgtcaagaagcaatcagtgtatctcatgaatctgagaaagagcggcacactcggtcatcccggaagtctggacgaaaccacatacgaacggctcgccgaggaaacgctggatagcctggccgagtttttcgaggacctggctgataaaccgtatactttcgaagattatgacgtgtcattcgggagcggcgtactgaccgtcaaattgggcggtgacctggggacatacgtgattaacaagcagactcctaataaacagatttggttgagctctccttccagcgggcctaaacgctatgattggacagggaagaattgggtttacagtcacgacggagttagccttcacgagctcttggcagcggagctgacaaaggcgctcaagaccaaactcgacctgtcttcactcgcctattcaggcaaagacgcctgactcgaggacggggtgaactacgcctgaggatccgatctttttccctctgccaaaaattatggggacatcatgaagccccttgagcatctgacttctggctaataaaggaaatttattttcattgcaatagtgtgttggaattttttgtgtctctcactcggaagcaattcgttgatctgaatttcgaccacccataatacccattaccctggtagataagtagcatggcgggttaatcattaactacaaggaacccctagtgatggagttggccactccctctctgcgcgctcgctcgctcactgaggccgggcgaccaaaggtcgcccgacgcccgggctttgcccgggcggcctcagtgagcgagcgagcgcgcagccttaattaacctaattcactggccgtcgttttacaacgtcgtgactgggaaaaccctggcgttacccaacttaatcgccttgcagcacatccccctttcgccagctggcgtaatagcgaagaggcccgcaccgatcgcccttcccaacagttgcgcagcctgaatggcgaatgggacgcgccctgtagcggcgcattaagcgcggcgggtgtggtggttacgcgcagcgtgaccgctacacttgccagcgccctagcgcccgctcctttcgctttcttcccttcctttctcgccacgttcgccggctttccccgtcaagctctaaatcgggggctccctttagggttccgatttagtgctttacggcacctcgaccccaaaaaacttgattagggtgatggttcacgtagtgggccatcgccctgatagacggtttttcgccctttgacgttggagtccacgttctttaatagtggactcttgttccaaactggaacaacactcaaccctatctcggtctattcttttgatttataagggattttgccgatttcggcctattggttaaaaaatgagctgatttaacaaaaatttaacgcgaattttaacaaaatattaacgcttacaatttaggtggcacttttcggggaaatgtgcgcggaacccctatttgtttatttttctaaatacattcaaatatgtatccgctcatgagacaataaccctgataaatgcttcaataatattgaaaaaggaagagtatgagtattcaacatttccgtgtcgcccttattcccttttttgcggcattttgccttcctgtttttgctcacccagaaacgctggtgaaagtaaaagatgctgaagatcagttgggtgcacgagtgggttacatcgaactggatctcaacagcggtaagatccttgagagttttcgccccgaagaacgttttccaatgatgagcacttttaaagttctgctatgtggcgcggtattatcccgtattgacgccgggcaagagcaactcggtcgccgcatacactattctcagaatgacttggttgagtactcaccagtcacagaaaagcatcttacggatggcatgacagtaagagaattatgcagtgctgccataaccatgagtgataacactgcggccaacttacttctgacaacgatcggaggaccgaaggagctaaccgcttttttgcacaacatgggggatcatgtaactcgccttgatcgttgggaaccggagctgaatgaagccataccaaacgacgagcgtgacaccacgatgcctgtagcaatggcaacaacgttgcgcaaactattaactggcgaactacttactctagcttcccggcaacaattaatagactggatggaggcggataaagttgcaggaccacttctgcgctcggcccttccggctggctggtttattgctgataaatctggagccggtgagcgtgggtctcgcggtatcattgcagcactggggccagatggtaagccctcccgtatcgtagttatctacacgacggggagtcaggcaactatggatgaacgaaatagacagatcgctgagataggtgcctcactgattaagcattggtaactgtcagaccaagtttactcatatatactttagattgatttaaaacttcatttttaatttaaaaggatctaggtgaagatcctttttgataatctcatgaccaaaatcccttaacgtgagttttcgttccactgagcgtcagaccccgtagaaaagatcaaaggatcttcttgagatcctttttttctgcgcgtaatctgctgcttgcaaacaaaaaaaccaccgctaccagcggtggtttgtttgccggatcaagagctaccaactctttttccgaaggtaactggcttcagcagagcgcagataccaaatactgttcttctagtgtagccgtagttaggccaccacttcaagaactctgtagcaccgcctacatacctcgctctgctaatcctgttaccagtggctgctgccagtggcgataagtcgtgtcttaccgggttggactcaagacgatagttaccggataaggcgcagcggtcgggctgaacggggggttcgtgcacacagcccagcttggagcgaacgacctacaccgaactgagatacctacagcgtgagctatgagaaagcgccacgcttcccgaagggagaaaggcggacaggtatccggtaagcggcagggtcggaacaggagagcgcacgagggagcttccagggggaaacgcctggtatctttatagtcctgtcgggtttcgccacctctgacttgagcgtcgatttttgtgatgctcgtcaggggggcggagcctatggaaaaacgccagcaacgcggcctttttacggttcctggccttttgctggccttttgctcacatgttctttcctgcgttatcccctgattctgtggataaccgtattaccgcctttgagtgagctgataccgctcgccgcagccgaacgaccgagcgcagcgagtcagtgagcgaggaagcggaagagcgcccaatacgcaaaccgcctctccccgcgcgttggccgattcattaatgcagctggcacgacaggtttcccgactggaaagcgggcagtgagcgcaacgcaattaatgtgagttagctcactcattaggcaccccaggctttacactttatgcttccggctcgtatgttgtgtggaattgtgagcggataacaatttcacacaggaaacagctatgaccatgattacgccagatttaattaag

SEQ ID NO: 620 - DNA, 5586 bp, Artificial Sequence
  Description of Artificial Sequence: Synthetic polynucleotide
gccttaattaggctgcgcgctcgctcgctcactgaggccgcccgggcaaagcccgggcgtcgggcgacctttggtcgcccggcctcagtgagcgagcgagcgcgcagagagggagtggccaactccatcactaggggttccttgtagttaatgattaacccgccatgctacttatctaccagggtaatggggatcctctagaactatagctagtcgacgagctcccaggctcaagtgatcctcccgcctcagcctcctgagtagctgagatcacaggcatgcactaccacactcggctcacatttgacatcctctaaagcatatataaaatgtgaagaaaactttcacaatttgcatccctttgtaatatgtaacagaaataaaattctcttttaaaatctatcaacaataggcaaggcacggtggctcacgcctgtcgtctcagcactttgtgaggcccaggcgggcagatcgtttgagcctagaagttcaagaccaccctgggcaacatagcgaaaccccctttctacaaaaaatacaaaaactagctgggtgtggtggtgcacacctgtagtcccagctacttggaaggctgaaatgggaagactgcttgagcccgggagggagaagttgcagtaagccaggaccacaccactgcactccagcctgggcaacagagtgagactctgtctcaaacaaacaaataaatgaggcgggtggatcacgaggtcagtagatcgagaccatcctggctaacacggtgaaacccgtctctactaaaaaaaaaaaaaaatacaaaaaattagccaggcatggtggcgggcgcctgtagtcccagttactcgggaggctgaggcaggagaatggcgtgaaaccgggaggcagagcttgcagtgagccgagatcgcaccactgccctccagcctgggcgacagagcgagactccgtctcaatcaatcaatcaatcaataaaatctattaacaatatttattgtgcacttaacaggaacatgccctgtccaaaaaaaactttacagggcttaactcattttatccttaccacaatcctatgaagtaggaacttttataaaacgcattttataaacaaggcacagagaggttaattaacttgccctctggtcacacagctaggaagtgggcagagtacagatttacacaaggcatccgtctcctggccccacatacccaactgctgtaaacccataccggcggccaagcagcctcaatttgtgcatgcacccacttcccagcaagacagcagctcccaagttcctcctgtttagaattttagaagcggcgggccaccaggctgcagtctcccttgggtcaggggtcctggttgcactccgtgctttgcacaaagcaggctctccatttttgttaaatgcacgaatagtgctaagctgggaagttcttcctgaggtctaacctctagctgctcccccacagaagagtgcctgcggccagtggccaccaggggtcgccgcagcacccagcgctggagggcggagcgggcggcagacccggagcagcaagtggactctctcgagaagcttgaactgaaaaaccagaaagttaactggtaagtttagtctttttgtcttttatttcaggtcccggatccggtggtggtgcaaatcaaagaactgctcctcagtggatgttgcctttacttctaggcctgtacggaagtgttacttctgctctaaaagctgcggaattgtacccgcggccgatccaccggtatgtggacactcgggcgacgcgccgtggctgggctgcttgcttccccaagtcccgcacaggcgcaaaccctcacaagggtcccacggccagctgaattggccccgctgtgcggtcggaggggcctgcgaacagatatagacgcaacgtgcacccccagaagagcaagcagcaaccagagaggcctcaatcagatttggaacgtcaagaaacagagtgtctatctgatgaacctccgcaaatcagggacccttggtcatccgggatctcttgatgaaacgacctatgaacggctggctgaggagacgcttgactccctggcagagttcttcgaggatctggctgataagccatacacgttcgaggactatgatgtttcttttggttctggcgtcctgacggtgaaactcggaggggatctgggcacttacgttatcaacaaacagactcccaataaacagatttggttgtctagtcctagcagtggcccaaaacgctatgactggacgggcaagaactgggtgtactcccacgatggagttagcctgcacgaacttctggccgctgagcttactaaagcgctgaagactaagctggatctctccagcctcgcatacagcggcaaagacgcctagctcgaggacggggtgaactacgcctgaggatccgatctttttccctctgccaaaaattatggggacatcatgaagccccttgagcatctgacttctggctaataaaggaaatttattttcattgcaatagtgtgttggaattttttgtgtctctcactcggaagcaattcgttgatctgaatttcgaccacccataatacccattaccctggtagataagtagcatggcgggttaatcattaactacaaggaacccctagtgatggagttggccactccctctctgcgcgctcgctcgctcactgaggccgggcgaccaaaggtcgcccgacgcccgggctttgcccgggcggcctcagtgagcgagcgagcgcgcagccttaattaacctaattcactggccgtcgttttacaacgtcgtgactgggaaaaccctggcgttacccaacttaatcgccttgcagcacatccccctttcgccagctggcgtaatagcgaagaggcccgcaccgatcgcccttcccaacagttgcgcagcctgaatggcgaatgggacgcgccctgtagcggcgcattaagcgcggcgggtgtggtggttacgcgcagcgtgaccgctacacttgccagcgccctagcgcccgctcctttcgctttcttcccttcctttctcgccacgttcgccggctttccccgtcaagctctaaatcgggggctccctttagggttccgatttagtgctttacggcacctcgaccccaaaaaacttgattagggtgatggttcacgtagtgggccatcgccctgatagacggtttttcgccctttgacgttggagtccacgttctttaatagtggactcttgttccaaactggaacaacactcaaccctatctcggtctattcttttgatttataagggattttgccgatttcggcctattggttaaaaaatgagctgatttaacaaaaatttaacgcgaattttaacaaaatattaacgcttacaatttaggtggcacttttcggggaaatgtgcgcggaacccctatttgtttatttttctaaatacattcaaatatgtatccgctcatgagacaataaccctgataaatgcttcaataatattgaaaaaggaagagtatgagtattcaacatttccgtgtcgcccttattcccttttttgcggcattttgccttcctgtttttgctcacccagaaacgctggtgaaagtaaaagatgctgaagatcagttgggtgcacgagtgggttacatcgaactggatctcaacagcggtaagatccttgagagttttcgccccgaagaacgttttccaatgatgagcacttttaaagttctgctatgtggcgcggtattatcccgtattgacgccgggcaagagcaactcggtcgccgcatacactattctcagaatgacttggttgagtactcaccagtcacagaaaagcatcttacggatggcatgacagtaagagaattatgcagtgctgccataaccatgagtgataacactgcggccaacttacttctgacaacgatcggaggaccgaaggagctaaccgcttttttgcacaacatgggggatcatgtaactcgccttgatcgttgggaaccggagctgaatgaagccataccaaacgacgagcgtgacaccacgatgcctgtagcaatggcaacaacgttgcgcaaactattaactggcgaactacttactctagcttcccggcaacaattaatagactggatggaggcggataaagttgcaggaccacttctgcgctcggcccttccggctggctggtttattgctgataaatctggagccggtgagcgtgggtctcgcggtatcattgcagcactggggccagatggtaagccctcccgtatcgtagttatctacacgacggggagtcaggcaactatggatgaacgaaatagacagatcgctgagataggtgcctcactgattaagcattggtaactgtcagaccaagtttactcatatatactttagattgatttaaaacttcatttttaatttaaaaggatctaggtgaagatcctttttgataatctcatgaccaaaatcccttaacgtgagttttcgttccactgagcgtcagaccccgtagaaaagatcaaaggatcttcttgagatcctttttttctgcgcgtaatctgctgcttgcaaacaaaaaaaccaccgctaccagcggtggtttgtttgccggatcaagagctaccaactctttttccgaaggtaactggcttcagcagagcgcagataccaaatactgttcttctagtgtagccgtagttaggccaccacttcaagaactctgtagcaccgcctacatacctcgctctgctaatcctgttaccagtggctgctgccagtggcgataagtcgtgtcttaccgggttggactcaagacgatagttaccggataaggcgcagcggtcgggctgaacggggggttcgtgcacacagcccagcttggagcgaacgacctacaccgaactgagatacctacagcgtgagctatgagaaagcgccacgcttcccgaagggagaaaggcggacaggtatccggtaagcggcagggtcggaacaggagagcgcacgagggagcttccagggggaaacgcctggtatctttatagtcctgtcgggtttcgccacctctgacttgagcgtcgatttttgtgatgctcgtcaggggggcggagcctatggaaaaacgccagcaacgcggcctttttacggttcctggccttttgctggccttttgctcacatgttctttcctgcgttatcccctgattctgtggataaccgtattaccgcctttgagtgagctgataccgctcgccgcagccgaacgaccgagcgcagcgagtcagtgagcgaggaagcggaagagcgcccaatacgcaaaccgcctctccccgcgcgttggccgattcattaatgcagctggcacgacaggtttcccgactggaaagcgggcagtgagcgcaacgcaattaatgtgagttagctcactcattaggcaccccaggctttacactttatgcttccggctcgtatgttgtgtggaattgtgagcggataacaatttcacacaggaaacagctatgaccatgattacgccagatttaattaag

SEQ ID NO: 621 - DNA, 5586 bp, Artificial Sequence
  Description of Artificial Sequence: Synthetic polynucleotide
gccttaattaggctgcgcgctcgctcgctcactgaggccgcccgggcaaagcccgggcgtcgggcgacctttggtcgcccggcctcagtgagcgagcgagcgcgcagagagggagtggccaactccatcactaggggttccttgtagttaatgattaacccgccatgctacttatctaccagggtaatggggatcctctagaactatagctagtcgacgagctcccaggctcaagtgatcctcccgcctcagcctcctgagtagctgagatcacaggcatgcactaccacactcggctcacatttgacatcctctaaagcatatataaaatgtgaagaaaactttcacaatttgcatccctttgtaatatgtaacagaaataaaattctcttttaaaatctatcaacaataggcaaggcacggtggctcacgcctgtcgtctcagcactttgtgaggcccaggcgggcagatcgtttgagcctagaagttcaagaccaccctgggcaacatagcgaaaccccctttctacaaaaaatacaaaaactagctgggtgtggtggtgcacacctgtagtcccagctacttggaaggctgaaatgggaagactgcttgagcccgggagggagaagttgcagtaagccaggaccacaccactgcactccagcctgggcaacagagtgagactctgtctcaaacaaacaaataaatgaggcgggtggatcacgaggtcagtagatcgagaccatcctggctaacacggtgaaacccgtctctactaaaaaaaaaaaaaaatacaaaaaattagccaggcatggtggcgggcgcctgtagtcccagttactcgggaggctgaggcaggagaatggcgtgaaaccgggaggcagagcttgcagtgagccgagatcgcaccactgccctccagcctgggcgacagagcgagactccgtctcaatcaatcaatcaatcaataaaatctattaacaatatttattgtgcacttaacaggaacatgccctgtccaaaaaaaactttacagggcttaactcattttatccttaccacaatcctatgaagtaggaacttttataaaacgcattttataaacaaggcacagagaggttaattaacttgccctctggtcacacagctaggaagtgggcagagtacagatttacacaaggcatccgtctcctggccccacatacccaactgctgtaaacccataccggcggccaagcagcctcaatttgtgcatgcacccacttcccagcaagacagcagctcccaagttcctcctgtttagaattttagaagcggcgggccaccaggctgcagtctcccttgggtcaggggtcctggttgcactccgtgctttgcacaaagcaggctctccatttttgttaaatgcacgaatagtgctaagctgggaagttcttcctgaggtctaacctctagctgctcccccacagaagagtgcctgcggccagtggccaccaggggtcgccgcagcacccagcgctggagggcggagcgggcggcagacccggagcagcaagtggactctctcgagaagcttgaactgaaaaaccagaaagttaactggtaagtttagtctttttgtcttttatttcaggtcccggatccggtggtggtgcaaatcaaagaactgctcctcagtggatgttgcctttacttctaggcctgtacggaagtgttacttctgctctaaaagctgcggaattgtacccgcggccgatccaccggtatgtggactctgggtcgacgcgccgtagccggtctcttggcctccccatcccctgcgcaggcacagacccttacacgagttccacggcccgctgaactggcaccactctgcggacgccggggcctgagaaccgatattgacgctacgtgcactccccgacgagcctcttctaatcagagggggctcaaccagatctggaacgtgaagaagcagtcagtctacttgatgaatctgagaaagagcgggacccttgggcaccccgggtctctcgacgagactacatacgagaggctggccgaggagactttggactctctcgccgaattcttcgaggatttggcagacaagccgtacacctttgaagactacgatgtctcattcggatcaggggtgctgacggttaaactggggggcgatctcggaacctacgtcataaacaaacagacacccaataagcagatctggttgtctagcccatcatccggtcctaaacggtacgactggaccggcaagaactgggtctactcccatgacggagtcagtcttcatgaactgcttgccgcagagctgaccaaggctcttaagacgaaactggatctctctagcctggcctactccgggaaggatgcatagctcgaggacggggtgaactacgcctgaggatccgatctttttccctctgccaaaaattatggggacatcatgaagccccttgagcatctgacttctggctaataaaggaaatttattttcattgcaatagtgtgttggaattttttgtgtctctcactcggaagcaattcgttgatctgaatttcgaccacccataatacccattaccctggtagataagtagcatggcgggttaatcattaactacaaggaacccctagtgatggagttggccactccctctctgcgcgctcgctcgctcactgaggccgggcgaccaaaggtcgcccgacgcccgggctttgcccgggcggcctcagtgagcgagcgagcgcgcagccttaattaacctaattcactggccgtcgttttacaacgtcgtgactgggaaaaccctggcgttacccaacttaatcgccttgcagcacatccccctttcgccagctggcgtaatagcgaagaggcccgcaccgatcgcccttcccaacagttgcgcagcctgaatggcgaatgggacgcgccctgtagcggcgcattaagcgcggcgggtgtggtggttacgcgcagcgtgaccgctacacttgccagcgccctagcgcccgctcctttcgctttcttcccttcctttctcgccacgttcgccggctttccccgtcaagctctaaatcgggggctccctttagggttccgatttagtgctttacggcacctcgaccccaaaaaacttgattagggtgatggttcacgtagtgggccatcgccctgatagacggtttttcgccctttgacgttggagtccacgttctttaatagtggactcttgttccaaactggaacaacactcaaccctatctcggtctattcttttgatttataagggattttgccgatttcggcctattggttaaaaaatgagctgatttaacaaaaatttaacgcgaattttaacaaaatattaacgcttacaatttaggtggcacttttcggggaaatgtgcgcggaacccctatttgtttatttttctaaatacattcaaatatgtatccgctcatgagacaataaccctgataaatgcttcaataatattgaaaaaggaagagtatgagtattcaacatttccgtgtcgcccttattcccttttttgcggcattttgccttcctgtttttgctcacccagaaacgctggtgaaagtaaaagatgctgaagatcagttgggtgcacgagtgggttacatcgaactggatctcaacagcggtaagatccttgagagttttcgccccgaagaacgttttccaatgatgagcacttttaaagttctgctatgtggcgcggtattatcccgtattgacgccgggcaagagcaactcggtcgccgcatacactattctcagaatgacttggttgagtactcaccagtcacagaaaagcatcttacggatggcatgacagtaagagaattatgcagtgctgccataaccatgagtgataacactgcggccaacttacttctgacaacgatcggaggaccgaaggagctaaccgcttttttgcacaacatgggggatcatgtaactcgccttgatcgttgggaaccggagctgaatgaagccataccaaacgacgagcgtgacaccacgatgcctgtagcaatggcaacaacgttgcgcaaactattaactggcgaactacttactctagcttcccggcaacaattaatagactggatggaggcggataaagttgcaggaccacttctgcgctcggcccttccggctggctggtttattgctgataaatctggagccggtgagcgtgggtctcgcggtatcattgcagcactggggccagatggtaagccctcccgtatcgtagttatctacacgacggggagtcaggcaactatggatgaacgaaatagacagatcgctgagataggtgcctcactgattaagcattggtaactgtcagaccaagtttactcatatatactttagattgatttaaaacttcatttttaatttaaaaggatctaggtgaagatcctttttgataatctcatgaccaaaatcccttaacgtgagttttcgttccactgagcgtcagaccccgtagaaaagatcaaaggatcttcttgagatcctttttttctgcgcgtaatctgctgcttgcaaacaaaaaaaccaccgctaccagcggtggtttgtttgccggatcaagagctaccaactctttttccgaaggtaactggcttcagcagagcgcagataccaaatactgttcttctagtgtagccgtagttaggccaccacttcaagaactctgtagcaccgcctacatacctcgctctgctaatcctgttaccagtggctgctgccagtggcgataagtcgtgtcttaccgggttggactcaagacgatagttaccggataaggcgcagcggtcgggctgaacggggggttcgtgcacacagcccagcttggagcgaacgacctacaccgaactgagatacctacagcgtgagctatgagaaagcgccacgcttcccgaagggagaaaggcggacaggtatccggtaagcggcagggtcggaacaggagagcgcacgagggagcttccagggggaaacgcctggtatctttatagtcctgtcgggtttcgccacctctgacttgagcgtcgatttttgtgatgctcgtcaggggggcggagcctatggaaaaacgccagcaacgcggcctttttacggttcctggccttttgctggccttttgctcacatgttctttcctgcgttatcccctgattctgtggataaccgtattaccgcctttgagtgagctgataccgctcgccgcagccgaacgaccgagcgcagcgagtcagtgagcgaggaagcggaagagcgcccaatacgcaaaccgcctctccccgcgcgttggccgattcattaatgcagctggcacgacaggtttcccgactggaaagcgggcagtgagcgcaacgcaattaatgtgagttagctcactcattaggcaccccaggctttacactttatgcttccggctcgtatgttgtgtggaattgtgagcggataacaatttcacacaggaaacagctatgaccatgattacgccagatttaattaag

SEQ ID NO: 622 - DNA, 6434 bp, Artificial Sequence
  Description of Artificial Sequence: Synthetic polynucleotide
gccttaattaggctgcgcgctcgctcgctcactgaggccgcccgggcaaagcccgggcgtcgggcgacctttggtcgcccggcctcagtgagcgagcgagcgcgcagagagggagtggccaactccatcactaggggttccttgtagttaatgattaacccgccatgctacttatctaccagggtaatggggacgcgtcccacctccctctctgtgctgggactcacagagggagacctcaggaggcagtctgtccatcacatgtccaaatgcagagcataccctgggctgggcgcagtggcgcacaactgtaattccagcactttgggaggctgatgtggaaggatcacttgagcccagaagttctagaccagcctgggcaacatggcaagaccctatctctacaaaaaaagttaaaaaatcagccacgtgtggtgacacacacctgtagtcccagctattcaggaggctgaggtgaggggatcacttaaggctgggaggttgaggctgcagtgagtcgtggttgcgccactgcactccagcctgggcaacagtgagaccctgtctcaaaagacaaaaaaaaaaaaaaaaaaaaaaagaacatatcctggtgtggagtaggggacgctgctctgacagaggctcgggggcctgagctggctctgtgagctggggaggaggcagacagccaggccttgtctgcaagcagacctggcagcattgggctggccgccccccagggcctcctcttcatgcccagtgaatgactcaccttggcacagacacaatgttcggggtgggcacagtgcctgcttcccgccgcaccccagcccccctcaaatgccttccgagaagcccattgagcagggggcttgcattgcaccccagcctgacagcctggcatcttgggataaaagcagcacagccccctaggggctgcccttgctgtgtggcgccaccggcggtggagaacaaggctctattcagcctgtgcccaggaaaggggatcaggggatgcccaggcatggacagtgggtggcagggggggagaggagggctgtctgcttcccagaagtccaaggacacaaatgggtgaggggactgggcagggttctgaccctgtgggaccagagtggagggcgtagatggacctgaagtctccagggacaacagggcccaggtctcaggctcctagttgggcccagtggctccagcgtttccaaacccatccatccccagaggttcttcccatctctccaggctgatgtgtgggaactcgaggaaataaatctccagtgggagacggaggggtggccagggaaacggggcgctgcaggaataaagacgagccagcacagccagctcatgtgtaacggctttgtggagctgtcaaggcctggtctctgggagagaggcacagggaggccagacaaggaaggggtgacctggagggacagatccaggggctaaagtcctgataaggcaagagagtgccggccccctcttgccctatcaggacctccactgccacatagaggccatgattgacccttagacaaagggctggtgtccaatcccagcccccagccccagaactccagggaatgaatgggcagagagcaggaatgtgggacatctgtgttcaagggaaggactccaggagtctgctgggaatgaggcctagtaggaaatgaggtggcccttgagggtacagaacaggttcattcttcgccaaattcccagcaccttgcaggcacttacagctgagtgagataatgcctgggttatgaaatcaaaaagttggaaagcaggtcagaggtcatctggtacagcccttccttccctttttttttttttttttttgtgagacaaggtctctctctgttgcccaggctggagtggcgcaaacacagctcactgcagcctcaacctactgggctcaagcaatcctccagcctcagcctcccaaagtgctgggattacaagcatgagccaccccactcagccctttccttcctttttaattgatgcataataattgtaagtattcatcatggtccaaccaaccctttcttgacccaccttcctagagagagggtcctcttgcttcagcggtcagggccccagacccatggtctggctccaggtaccacctgcctcatgcaggagttggcgtgcccaggaagctctgcctctgggcacagtgacctcagtggggtgaggggagctctccccatagctgggctgcggcccaaccccaccccctcaggctatgccagggggtgttgccaggggcacccgggcatcgccagtctagcccactccttcataaagccctcgcatcccaggagcgagcagagccagagcaggttggagaggagacgcatcacctccgctgctcgccgggatcctcgggagcaagcttgaactgaaaaaccagaaagttaactggtaagtttagtctttttgtcttttatttcaggtcccggatccggtggtggtgcaaatcaaagaactgctcctcagtggatgttgcctttacttctaggcctgtacggaagtgttacttctgctctaaaagctgcggaattgtacccgcggccgatccaccggtatgtggactctcgggcgccgcgcagtagccggcctcctggcgtcacccagcccggcccaggcccagaccctcacccgggtcccgcggccggcagagttggccccactctgcggccgccgtggcctgcgcaccgacatcgatgcgacctgcacgccccgccgcgcaagttcgaaccaacgtggcctcaaccagatttggaatgtcaaaaagcagagtgtctatttgatgaatttgaggaaatctggaactttgggccacccaggctctctagatgagaccacctatgaaagactagcagaggaaacgctggactctttagcagagttttttgaagaccttgcagacaagccatacacgtttgaggactatgatgtctcctttgggagtggtgtcttaactgtcaaactgggtggagatctaggaacctatgtgatcaacaagcagacgccaaacaagcaaatctggctatcttctccatccagtggacctaagcgttatgactggactgggaaaaactgggtgttctcccacgacggcgtgtccctccatgagctgctggccgcagagctcactaaagccttaaaaaccaaactggacttgtcttggttggcctattccggaaaagatgcttgactcgaggacggggtgaactacgcctgaggatccgatctttttccctctgccaaaaattatggggacatcatgaagccccttgagcatctgacttctggctaataaaggaaatttattttcattgcaatagtgtgttggaattttttgtgtctctcactcggaagcaattcgttgatctgaatttcgaccacccataatacccattaccctggtagataagtagcatggcgggttaatcattaactacaaggaacccctagtgatggagttggccactccctctctgcgcgctcgctcgctcactgaggccgggcgaccaaaggtcgcccgacgcccgggctttgcccgggcggcctcagtgagcgagcgagcgcgcagccttaattaacctaattcactggccgtcgttttacaacgtcgtgactgggaaaaccctggcgttacccaacttaatcgccttgcagcacatccccctttcgccagctggcgtaatagcgaagaggcccgcaccgatcgcccttcccaacagttgcgcagcctgaatggcgaatgggacgcgccctgtagcggcgcattaagcgcggcgggtgtggtggttacgcgcagcgtgaccgctacacttgccagcgccctagcgcccgctcctttcgctttcttcccttcctttctcgccacgttcgccggctttccccgtcaagctctaaatcgggggctccctttagggttccgatttagtgctttacggcacctcgaccccaaaaaacttgattagggtgatggttcacgtagtgggccatcgccctgatagacggtttttcgccctttgacgttggagtccacgttctttaatagtggactcttgttccaaactggaacaacactcaaccctatctcggtctattcttttgatttataagggattttgccgatttcggcctattggttaaaaaatgagctgatttaacaaaaatttaacgcgaattttaacaaaatattaacgcttacaatttaggtggcacttttcggggaaatgtgcgcggaacccctatttgtttatttttctaaatacattcaaatatgtatccgctcatgagacaataaccctgataaatgcttcaataatattgaaaaaggaagagtatgagtattcaacatttccgtgtcgcccttattcccttttttgcggcattttgccttcctgtttttgctcacccagaaacgctggtgaaagtaaaagatgctgaagatcagttgggtgcacgagtgggttacatcgaactggatctcaacagcggtaagatccttgagagttttcgccccgaagaacgttttccaatgatgagcacttttaaagttctgctatgtggcgcggtattatcccgtattgacgccgggcaagagcaactcggtcgccgcatacactattctcagaatgacttggttgagtactcaccagtcacagaaaagcatcttacggatggcatgacagtaagagaattatgcagtgctgccataaccatgagtgataacactgcggccaacttacttctgacaacgatcggaggaccgaaggagctaaccgcttttttgcacaacatgggggatcatgtaactcgccttgatcgttgggaaccggagctgaatgaagccataccaaacgacgagcgtgacaccacgatgcctgtagcaatggcaacaacgttgcgcaaactattaactggcgaactacttactctagcttcccggcaacaattaatagactggatggaggcggataaagttgcaggaccacttctgcgctcggcccttccggctggctggtttattgctgataaatctggagccggtgagcgtgggtctcgcggtatcattgcagcactggggccagatggtaagccctcccgtatcgtagttatctacacgacggggagtcaggcaactatggatgaacgaaatagacagatcgctgagataggtgcctcactgattaagcattggtaactgtcagaccaagtttactcatatatactttagattgatttaaaacttcatttttaatttaaaaggatctaggtgaagatcctttttgataatctcatgaccaaaatcccttaacgtgagttttcgttccactgagcgtcagaccccgtagaaaagatcaaaggatcttcttgagatcctttttttctgcgcgtaatctgctgcttgcaaacaaaaaaaccaccgctaccagcggtggtttgtttgccggatcaagagctaccaactctttttccgaaggtaactggcttcagcagagcgcagataccaaatactgttcttctagtgtagccgtagttaggccaccacttcaagaactctgtagcaccgcctacatacctcgctctgctaatcctgttaccagtggctgctgccagtggcgataagtcgtgtcttaccgggttggactcaagacgatagttaccggataaggcgcagcggtcgggctgaacggggggttcgtgcacacagcccagcttggagcgaacgacctacaccgaactgagatacctacagcgtgagctatgagaaagcgccacgcttcccgaagggagaaaggcggacaggtatccggtaagcggcagggtcggaacaggagagcgcacgagggagcttccagggggaaacgcctggtatctttatagtcctgtcgggtttcgccacctctgacttgagcgtcgatttttgtgatgctcgtcaggggggcggagcctatggaaaaacgccagcaacgcggcctttttacggttcctggccttttgctggccttttgctcacatgttctttcctgcgttatcccctgattctgtggataaccgtattaccgcctttgagtgagctgataccgctcgccgcagccgaacgaccgagcgcagcgagtcagtgagcgaggaagcggaagagcgcccaatacgcaaaccgcctctccccgcgcgttggccgattcattaatgcagctggcacgacaggtttcccgactggaaagcgggcagtgagcgcaacgcaattaatgtgagttagctcactcattaggcaccccaggctttacactttatgcttccggctcgtatgttgtgtggaattgtgagcggataacaatttcacacaggaaacagctatgaccatgattacgccagatttaattaag

SEQ ID NO: 623 - DNA, 4790 bp, Artificial Sequence
  Description of Artificial Sequence: Synthetic polynucleotide
gccttaattaggctgcgcgctcgctcgctcactgaggccgcccgggcaaagcccgggcgtcgggcgacctttggtcgcccggcctcagtgagcgagcgagcgcgcagagagggagtggccaactccatcactaggggttccttgtagttaatgattaacccgccatgctacttatctaccagggtaatggggatcctctagaactatagctagtcgactagtatctgcagagggccctgcgtatgagtgcaagtgggttttaggaccaggatgaggcggggtgggggtgcctacctgacgaccgaccccgacccactggacaagcacccaacccccattccccaaattgcgcatcccctatcagagagggggaggggaaacaggatgcggcgaggcgcgtgcgcactgccagcttcagcaccgcggacagtgccttcgcccccgcctggcggcgcgcgccaccgccgcctcagcactgaaggcgcgctgacgtcactcgccggtcccccgcaaactccccttcccggccaccttggtcgcgtccgcgccgccgccggcccagccggaccgcaccacgcgaggcgcgagataggggggcacgggcgcgaccatctgcgctgcggcgccggcgactcagcgctgcctcagtctgcggtgggcagcggaggagtcgtgtcgtgcctgagagcgcagctgtgctcctgggcaccgcgcagtccgcccccgcggctcctggccagaccacccctaggaccccctgccccaagtcgcagccaagcttgaactgaaaaaccagaaagttaactggtaagtttagtctttttgtcttttatttcaggtcccggatccggtggtggtgcaaatcaaagaactgctcctcagtggatgttgcctttacttctaggcctgtacggaagtgttacttctgctctaaaagctgcggaattgtacccgcggccgatccaccggtatgtggactctcgggcgccgcgcagtagccggcctcctggcgtcacccagcccagcccaggcccagaccctcacccgggtcccgcggccggcagagttggccccactctgcggccgccgtggcctgcgcaccgacatcgatgcgacctgcacgccccgccgcgcaagttcgaaccaacgtggcctcaaccagatttggaatgtcaaaaagcagagtgtctatttgatgaatttgaggaaatctggaactttgggccacccaggctctctagatgagaccacctatgaaagactagcagaggaaacgctggactctttagcagagttttttgaagaccttgcagacaagccatacacgtttgaggactatgatgtctcctttgggagtggtgtcttaactgtcaaactgggtggagatctaggaacctatgtgatcaacaagcagacgccaaacaagcaaatctggctatcttctccatccagtggacctaagcgttatgactggactgggaaaaactgggtgtactcccacgacggcgtgtccctccatgagctgctggccgcagagctcactaaagccttaaaaaccaaactggacttgtcttccttggcctattccggaaaagatgcttgactcgaggacggggtgaactacgcctgaggatccgatctttttccctctgccaaaaattatggggacatcatgaagccccttgagcatctgacttctggctaataaaggaaatttattttcattgcaatagtgtgttggaattttttgtgtctctcactcggaagcaattcgttgatctgaatttcgaccacccataatacccattaccctggtagataagtagcatggcgggttaatcattaactacaaggaacccctagtgatggagttggccactccctctctgcgcgctcgctcgctcactgaggccgggcgaccaaaggtcgcccgacgcccgggctttgcccgggcggcctcagtgagcgagcgagcgcgcagccttaattaacctaattcactggccgtcgttttacaacgtcgtgactgggaaaaccctggcgttacccaacttaatcgccttgcagcacatccccctttcgccagctggcgtaatagcgaagaggcccgcaccgatcgcccttcccaacagttgcgcagcctgaatggcgaatgggacgcgccctgtagcggcgcattaagcgcggcgggtgtggtggttacgcgcagcgtgaccgctacacttgccagcgccctagcgcccgctcctttcgctttcttcccttcctttctcgccacgttcgccggctttccccgtcaagctctaaatcgggggctccctttagggttccgatttagtgctttacggcacctcgaccccaaaaaacttgattagggtgatggttcacgtagtgggccatcgccctgatagacggtttttcgccctttgacgttggagtccacgttctttaatagtggactcttgttccaaactggaacaacactcaaccctatctcggtctattcttttgatttataagggattttgccgatttcggcctattggttaaaaaatgagctgatttaacaaaaatttaacgcgaattttaacaaaatattaacgcttacaatttaggtggcacttttcggggaaatgtgcgcggaacccctatttgtttatttttctaaatacattcaaatatgtatccgctcatgagacaataaccctgataaatgcttcaataatattgaaaaaggaagagtatgagtattcaacatttccgtgtcgcccttattcccttttttgcggcattttgccttcctgtttttgctcacccagaaacgctggtgaaagtaaaagatgctgaagatcagttgggtgcacgagtgggttacatcgaactggatctcaacagcggtaagatccttgagagttttcgccccgaagaacgttttccaatgatgagcacttttaaagttctgctatgtggcgcggtattatcccgtattgacgccgggcaagagcaactcggtcgccgcatacactattctcagaatgacttggttgagtactcaccagtcacagaaaagcatcttacggatggcatgacagtaagagaattatgcagtgctgccataaccatgagtgataacactgcggccaacttacttctgacaacgatcggaggaccgaaggagctaaccgcttttttgcacaacatgggggatcatgtaactcgccttgatcgttgggaaccggagctgaatgaagccataccaaacgacgagcgtgacaccacgatgcctgtagcaatggcaacaacgttgcgcaaactattaactggcgaactacttactctagcttcccggcaacaattaatagactggatggaggcggataaagttgcaggaccacttctgcgctcggcccttccggctggctggtttattgctgataaatctggagccggtgagcgtgggtctcgcggtatcattgcagcactggggccagatggtaagccctcccgtatcgtagttatctacacgacggggagtcaggcaactatggatgaacgaaatagacagatcgctgagataggtgcctcactgattaagcattggtaactgtcagaccaagtttactcatatatactttagattgatttaaaacttcatttttaatttaaaaggatctaggtgaagatcctttttgataatctcatgaccaaaatcccttaacgtgagttttcgttccactgagcgtcagaccccgtagaaaagatcaaaggatcttcttgagatcctttttttctgcgcgtaatctgctgcttgcaaacaaaaaaaccaccgctaccagcggtggtttgtttgccggatcaagagctaccaactctttttccgaaggtaactggcttcagcagagcgcagataccaaatactgttcttctagtgtagccgtagttaggccaccacttcaagaactctgtagcaccgcctacatacctcgctctgctaatcctgttaccagtggctgctgccagtggcgataagtcgtgtcttaccgggttggactcaagacgatagttaccggataaggcgcagcggtcgggctgaacggggggttcgtgcacacagcccagcttggagcgaacgacctacaccgaactgagatacctacagcgtgagctatgagaaagcgccacgcttcccgaagggagaaaggcggacaggtatccggtaagcggcagggtcggaacaggagagcgcacgagggagcttccagggggaaacgcctggtatctttatagtcctgtcgggtttcgccacctctgacttgagcgtcgatttttgtgatgctcgtcaggggggcggagcctatggaaaaacgccagcaacgcggcctttttacggttcctggccttttgctggccttttgctcacatgttctttcctgcgttatcccctgattctgtggataaccgtattaccgcctttgagtgagctgataccgctcgccgcagccgaacgaccgagcgcagcgagtcagtgagcgaggaagcggaagagcgcccaatacgcaaaccgcctctccccgcgcgttggccgattcattaatgcagctggcacgacaggtttcccgactggaaagcgggcagtgagcgcaacgcaattaatgtgagttagctcactcattaggcaccccaggctttacactttatgcttccggctcgtatgttgtgtggaattgtgagcggataacaatttcacacaggaaacagctatgaccatgattacgccagatttaattaag

SEQ ID NO: 624 - DNA, 4880 bp, Artificial Sequence
  Description of Artificial Sequence: Synthetic polynucleotide
gccttaattaggctgcgcgctcgctcgctcactgaggccgcccgggcaaagcccgggcgtcgggcgacctttggtcgcccggcctcagtgagcgagcgagcgcgcagagagggagtggccaactccatcactaggggttccttgtagttaatgattaacccgccatgctacttatctaccagggtaatggggatcctctagaactatagctagtcgacgagtcaatgggaaaaacccattggagccaagtacactgactcaatagggactttccattgggttttgcccagtacataaggtcaatagggggtgagtcaacaggaaagtcccattggagccaagtacattgagtcaatagggactttccaatgggttttgcccagtacataaggtcaatgggaggtaagccaatgggtttttcccattactgacatgtatactgagtcattagggactttccaatgggttttgcccagtacataaggtcaataggggtgaatcaacaggaaagtcccattggagccaagtacactgagtcaatagggactttccattgggttttgcccagtacaaaaggtcaatagggggtgagtcaatgggtttttcccattattggcacatacataaggtcaataggggtgactagtggagaagagcatgcttgagggctgagtgcccctcagtgggcagagagcacatggcccacagtccctgagaagttggggggaggggtgggcaattgaactggtgcctagagaaggtggggcttgggtaaactgggaaagtgatgtggtgtactggctccacctttttccccagggtgggggagaaccatatataagtgcagtagtctctgtgaacattcaagcttgaactgaaaaaccagaaagttaactggtaagtttagtctttttgtcttttatttcaggtcccggatccggtggtggtgcaaatcaaagaactgctcctcagtggatgttgcctttacttctaggcctgtacggaagtgttacttctgctctaaaagctgcggaattgtacccgcggccgatccaccggtatgtggactctcgggcgccgcgcagtagccggcctcctggcgtcacccagcccagcccaggcccagaccctcacccgggtcccgcggccggcagagttggccccactctgcggccgccgtggcctgcgcaccgacatcgatgcgacctgcacgccccgccgcgcaagttcgaaccaacgtggcctcaaccagatttggaatgtcaaaaagcagagtgtctatttgatgaatttgaggaaatctggaactttgggccacccaggctctctagatgagaccacctatgaaagactagcagaggaaacgctggactctttagcagagttttttgaagaccttgcagacaagccatacacgtttgaggactatgatgtctcctttgggagtggtgtcttaactgtcaaactgggtggagatctaggaacctatgtgatcaacaagcagacgccaaacaagcaaatctggctatcttctccatccagtggacctaagcgttatgactggactgggaaaaactgggtgtactcccacgacggcgtgtccctccatgagctgctggccgcagagctcactaaagccttaaaaaccaaactggacttgtcttccttggcctattccggaaaagatgcttgactcgaggacggggtgaactacgcctgaggatccgatctttttccctctgccaaaaattatggggacatcatgaagccccttgagcatctgacttctggctaataaaggaaatttattttcattgcaatagtgtgttggaattttttgtgtctctcactcggaagcaattcgttgatctgaatttcgaccacccataatacccattaccctggtagataagtagcatggcgggttaatcattaactacaaggaacccctagtgatggagttggccactccctctctgcgcgctcgctcgctcactgaggccgggcgaccaaaggtcgcccgacgcccgggctttgcccgggcggcctcagtgagcgagcgagcgcgcagccttaattaacctaattcactggccgtcgttttacaacgtcgtgactgggaaaaccctggcgttacccaacttaatcgccttgcagcacatccccctttcgccagctggcgtaatagcgaagaggcccgcaccgatcgcccttcccaacagttgcgcagcctgaatggcgaatgggacgcgccctgtagcggcgcattaagcgcggcgggtgtggtggttacgcgcagcgtgaccgctacacttgccagcgccctagcgcccgctcctttcgctttcttcccttcctttctcgccacgttcgccggctttccccgtcaagctctaaatcgggggctccctttagggttccgatttagtgctttacggcacctcgaccccaaaaaacttgattagggtgatggttcacgtagtgggccatcgccctgatagacggtttttcgccctttgacgttggagtccacgttctttaatagtggactcttgttccaaactggaacaacactcaaccctatctcggtctattcttttgatttataagggattttgccgatttcggcctattggttaaaaaatgagctgatttaacaaaaatttaacgcgaattttaacaaaatattaacgcttacaatttaggtggcacttttcggggaaatgtgcgcggaacccctatttgtttatttttctaaatacattcaaatatgtatccgctcatgagacaataaccctgataaatgcttcaataatattgaaaaaggaagagtatgagtattcaacatttccgtgtcgcccttattcccttttttgcggcattttgccttcctgtttttgctcacccagaaacgctggtgaaagtaaaagatgctgaagatcagttgggtgcacgagtgggttacatcgaactggatctcaacagcggtaagatccttgagagttttcgccccgaagaacgttttccaatgatgagcacttttaaagttctgctatgtggcgcggtattatcccgtattgacgccgggcaagagcaactcggtcgccgcatacactattctcagaatgacttggttgagtactcaccagtcacagaaaagcatcttacggatggcatgacagtaagagaattatgcagtgctgccataaccatgagtgataacactgcggccaacttacttctgacaacgatcggaggaccgaaggagctaaccgcttttttgcacaacatgggggatcatgtaactcgccttgatcgttgggaaccggagctgaatgaagccataccaaacgacgagcgtgacaccacgatgcctgtagcaatggcaacaacgttgcgcaaactattaactggcgaactacttactctagcttcccggcaacaattaatagactggatggaggcggataaagttgcaggaccacttctgcgctcggcccttccggctggctggtttattgctgataaatctggagccggtgagcgtgggtctcgcggtatcattgcagcactggggccagatggtaagccctcccgtatcgtagttatctacacgacggggagtcaggcaactatggatgaacgaaatagacagatcgctgagataggtgcctcactgattaagcattggtaactgtcagaccaagtttactcatatatactttagattgatttaaaacttcatttttaatttaaaaggatctaggtgaagatcctttttgataatctcatgaccaaaatcccttaacgtgagttttcgttccactgagcgtcagaccccgtagaaaagatcaaaggatcttcttgagatcctttttttctgcgcgtaatctgctgcttgcaaacaaaaaaaccaccgctaccagcggtggtttgtttgccggatcaagagctaccaactctttttccgaaggtaactggcttcagcagagcgcagataccaaatactgttcttctagtgtagccgtagttaggccaccacttcaagaactctgtagcaccgcctacatacctcgctctgctaatcctgttaccagtggctgctgccagtggcgataagtcgtgtcttaccgggttggactcaagacgatagttaccggataaggcgcagcggtcgggctgaacggggggttcgtgcacacagcccagcttggagcgaacgacctacaccgaactgagatacctacagcgtgagctatgagaaagcgccacgcttcccgaagggagaaaggcggacaggtatccggtaagcggcagggtcggaacaggagagcgcacgagggagcttccagggggaaacgcctggtatctttatagtcctgtcgggtttcgccacctctgacttgagcgtcgatttttgtgatgctcgtcaggggggcggagcctatggaaaaacgccagcaacgcggcctttttacggttcctggccttttgctggccttttgctcacatgttctttcctgcgttatcccctgattctgtggataaccgtattaccgcctttgagtgagctgataccgctcgccgcagccgaacgaccgagcgcagcgagtcagtgagcgaggaagcggaagagcgcccaatacgcaaaccgcctctccccgcgcgttggccgattcattaatgcagctggcacgacaggtttcccgactggaaagcgggcagtgagcgcaacgcaattaatgtgagttagctcactcattaggcaccccaggctttacactttatgcttccggctcgtatgttgtgtggaattgtgagcggataacaatttcacacaggaaacagctatgaccatgattacgccagatttaattaag

SEQ ID NO: 625 - DNA, 4881 bp, Artificial Sequence
  Description of Artificial Sequence: Synthetic polynucleotide
gccttaattaggctgcgcgctcgctcgctcactgaggccgcccgggcaaagcccgggcgtcgggcgacctttggtcgcccggcctcagtgagcgagcgagcgcgcagagagggagtggccaactccatcactaggggttccttgtagttaatgattaacccgccatgctacttatctaccagggtaatggggatcctctagaactatagctagtcgacgagtcaatgggaaaaacccattggagccaagtacactgactcaatagggactttccattgggttttgcccagtacataaggtcaatagggggtgagtcaacaggaaagtcccattggagccaagtacattgagtcaatagggactttccaatgggttttgcccagtacataaggtcaatgggaggtaagccaatgggtttttcccattactgacatgtatactgagtcattagggactttccaatgggttttgcccagtacataaggtcaataggggtgaatcaacaggaaagtcccattggagccaagtacactgagtcaatagggactttccattgggttttgcccagtacaaaaggtcaatagggggtgagtcaatgggtttttcccattattggcacatacataaggtcaataggggtgactagtcagtgggcagagcgcacatcgcccacagtccccgagaagttggggggaggggtcggcaattgaaccggtgcctagagaaggtggcgcggggtaaactgggaaagtgatgtcgtgtactggctccgcctttttcccgagggtgggggagaaccgtatataagtgcagtagtcgccgtgaacgttctttttcgcaacgggtttgccgccagaacacagctgaagcttgaactgaaaaaccagaaagttaactggtaagtttagtctttttgtcttttatttcaggtcccggatccggtggtggtgcaaatcaaagaactgctcctcagtggatgttgcctttacttctaggcctgtacggaagtgttacttctgctctaaaagctgcggaattgtacccgcggccgatccaccggtatgtggactctcgggcgccgcgcagtagccggcctcctggcgtcacccagcccagcccaggcccagaccctcacccgggtcccgcggccggcagagttggccccactctgcggccgccgtggcctgcgcaccgacatcgatgcgacctgcacgccccgccgcgcaagttcgaaccaacgtggcctcaaccagatttggaatgtcaaaaagcagagtgtctatttgatgaatttgaggaaatctggaactttgggccacccaggctctctagatgagaccacctatgaaagactagcagaggaaacgctggactctttagcagagttttttgaagaccttgcagacaagccatacacgtttgaggactatgatgtctcctttgggagtggtgtcttaactgtcaaactgggtggagatctaggaacctatgtgatcaacaagcagacgccaaacaagcaaatctggctatcttctccatccagtggacctaagcgttatgactggactgggaaaaactgggtgtactcccacgacggcgtgtccctccatgagctgctggccgcagagctcactaaagccttaaaaaccaaactggacttgtcttccttggcctattccggaaaagatgcttgactcgaggacggggtgaactacgcctgaggatccgatctttttccctctgccaaaaattatggggacatcatgaagccccttgagcatctgacttctggctaataaaggaaatttattttcattgcaatagtgtgttggaattttttgtgtctctcactcggaagcaattcgttgatctgaatttcgaccacccataatacccattaccctggtagataagtagcatggcgggttaatcattaactacaaggaacccctagtgatggagttggccactccctctctgcgcgctcgctcgctcactgaggccgggcgaccaaaggtcgcccgacgcccgggctttgcccgggcggcctcagtgagcgagcgagcgcgcagccttaattaacctaattcactggccgtcgttttacaacgtcgtgactgggaaaaccctggcgttacccaacttaatcgccttgcagcacatccccctttcgccagctggcgtaatagcgaagaggcccgcaccgatcgcccttcccaacagttgcgcagcctgaatggcgaatgggacgcgccctgtagcggcgcattaagcgcggcgggtgtggtggttacgcgcagcgtgaccgctacacttgccagcgccctagcgcccgctcctttcgctttcttcccttcctttctcgccacgttcgccggctttccccgtcaagctctaaatcgggggctccctttagggttccgatttagtgctttacggcacctcgaccccaaaaaacttgattagggtgatggttcacgtagtgggccatcgccctgatagacggtttttcgccctttgacgttggagtccacgttctttaatagtggactcttgttccaaactggaacaacactcaaccctatctcggtctattcttttgatttataagggattttgccgatttcggcctattggttaaaaaatgagctgatttaacaaaaatttaacgcgaattttaacaaaatattaacgcttacaatttaggtggcacttttcggggaaatgtgcgcggaacccctatttgtttatttttctaaatacattcaaatatgtatccgctcatgagacaataaccctgataaatgcttcaataatattgaaaaaggaagagtatgagtattcaacatttccgtgtcgcccttattcccttttttgcggcattttgccttcctgtttttgctcacccagaaacgctggtgaaagtaaaagatgctgaagatcagttgggtgcacgagtgggttacatcgaactggatctcaacagcggtaagatccttgagagttttcgccccgaagaacgttttccaatgatgagcacttttaaagttctgctatgtggcgcggtattatcccgtattgacgccgggcaagagcaactcggtcgccgcatacactattctcagaatgacttggttgagtactcaccagtcacagaaaagcatcttacggatggcatgacagtaagagaattatgcagtgctgccataaccatgagtgataacactgcggccaacttacttctgacaacgatcggaggaccgaaggagctaaccgcttttttgcacaacatgggggatcatgtaactcgccttgatcgttgggaaccggagctgaatgaagccataccaaacgacgagcgtgacaccacgatgcctgtagcaatggcaacaacgttgcgcaaactattaactggcgaactacttactctagcttcccggcaacaattaatagactggatggaggcggataaagttgcaggaccacttctgcgctcggcccttccggctggctggtttattgctgataaatctggagccggtgagcgtgggtctcgcggtatcattgcagcactggggccagatggtaagccctcccgtatcgtagttatctacacgacggggagtcaggcaactatggatgaacgaaatagacagatcgctgagataggtgcctcactgattaagcattggtaactgtcagaccaagtttactcatatatactttagattgatttaaaacttcatttttaatttaaaaggatctaggtgaagatcctttttgataatctcatgaccaaaatcccttaacgtgagttttcgttccactgagcgtcagaccccgtagaaaagatcaaaggatcttcttgagatcctttttttctgcgcgtaatctgctgcttgcaaacaaaaaaaccaccgctaccagcggtggtttgtttgccggatcaagagctaccaactctttttccgaaggtaactggcttcagcagagcgcagataccaaatactgttcttctagtgtagccgtagttaggccaccacttcaagaactctgtagcaccgcctacatacctcgctctgctaatcctgttaccagtggctgctgccagtggcgataagtcgtgtcttaccgggttggactcaagacgatagttaccggataaggcgcagcggtcgggctgaacggggggttcgtgcacacagcccagcttggagcgaacgacctacaccgaactgagatacctacagcgtgagctatgagaaagcgccacgcttcccgaagggagaaaggcggacaggtatccggtaagcggcagggtcggaacaggagagcgcacgagggagcttccagggggaaacgcctggtatctttatagtcctgtcgggtttcgccacctctgacttgagcgtcgatttttgtgatgctcgtcaggggggcggagcctatggaaaaacgccagcaacgcggcctttttacggttcctggccttttgctggccttttgctcacatgttctttcctgcgttatcccctgattctgtggataaccgtattaccgcctttgagtgagctgataccgctcgccgcagccgaacgaccgagcgcagcgagtcagtgagcgaggaagcggaagagcgcccaatacgcaaaccgcctctccccgcgcgttggccgattcattaatgcagctggcacgacaggtttcccgactggaaagcgggcagtgagcgcaacgcaattaatgtgagttagctcactcattaggcaccccaggctttacactttatgcttccggctcgtatgttgtgtggaattgtgagcggataacaatttcacacaggaaacagctatgaccatgattacgccagatttaattaag

SEQ ID NO: 626 - DNA, 4746 bp, Artificial Sequence
  Description of Artificial Sequence: Synthetic polynucleotide
gccttaattaggctgcgcgctcgctcgctcactgaggccgcccgggcaaagcccgggcgtcgggcgacctttggtcgcccggcctcagtgagcgagcgagcgcgcagagagggagtggccaactccatcactaggggttccttgtagttaatgattaacccgccatgctacttatctaccagggtaatggggatcctctagaactatagtccacggggttggggttgcgccttttccaaggcagccctgggtttgcgcagggacgcggctgctctgggcgtggttccgggaaacgcagcggcgccgaccctgggtctcgcacattcttcacgtccgttcgcagcgtcacccggatcttcgccgctacccttgtgggccccccggcgacgcttcctcgtccgcccctaagtcgggaaggttccttgcggttcgcggcgtgccggacgtgacaaacggaagccgcacgtctcactagtaccctcgcagacggacagcgccagggagcaatggcagcgcgccgaccgcgatgggctgtggccaatagcggctgctcagcagggcgcgccgagagcagcggccgggaaggggcggtgcgggaggcggggtgtggggcggtagtgtgggccctgttcctgcccgcgcggtgttccgcattctgcaagcctccggagcgcacgtcggcagtcggctccctcgttgaccgaatcaccgacctctctccccacgggagcaagcttgaactgaaaaaccagaaagttaactggtaagtttagtctttttgtcttttatttcaggtcccggatccggtggtggtgcaaatcaaagaactgctcctcagtggatgttgcctttacttctaggcctgtacggaagtgttacttctgctctaaaagctgcggaattgtacccgcggccgatccaccggtatgtggactctcgggcgccgcgcagtagccggcctcctggcgtcacccagcccagcccaggcccagaccctcacccgggtcccgcggccggcagagttggccccactctgcggccgccgtggcctgcgcaccgacatcgatgcgacctgcacgccccgccgcgcaagttcgaaccaacgtggcctcaaccagatttggaatgtcaaaaagcagagtgtctatttgatgaatttgaggaaatctggaactttgggccacccaggctctctagatgagaccacctatgaaagactagcagaggaaacgctggactctttagcagagttttttgaagaccttgcagacaagccatacacgtttgaggactatgatgtctcctttgggagtggtgtcttaactgtcaaactgggtggagatctaggaacctatgtgatcaacaagcagacgccaaacaagcaaatctggctatcttctccatccagtggacctaagcgttatgactggactgggaaaaactgggtgtactcccacgacggcgtgtccctccatgagctgctggccgcagagctcactaaagccttaaaaaccaaactggacttgtcttccttggcctattccggaaaagatgcttgactcgaggacggggtgaactacgcctgaggatccgatctttttccctctgccaaaaattatggggacatcatgaagccccttgagcatctgacttctggctaataaaggaaatttattttcattgcaatagtgtgttggaattttttgtgtctctcactcggaagcaattcgttgatctgaatttcgaccacccataatacccattaccctggtagataagtagcatggcgggttaatcattaactacaaggaacccctagtgatggagttggccactccctctctgcgcgctcgctcgctcactgaggccgggcgaccaaaggtcgcccgacgcccgggctttgcccgggcggcctcagtgagcgagcgagcgcgcagccttaattaacctaattcactggccgtcgttttacaacgtcgtgactgggaaaaccctggcgttacccaacttaatcgccttgcagcacatccccctttcgccagctggcgtaatagcgaagaggcccgcaccgatcgcccttcccaacagttgcgcagcctgaatggcgaatgggacgcgccctgtagcggcgcattaagcgcggcgggtgtggtggttacgcgcagcgtgaccgctacacttgccagcgccctagcgcccgctcctttcgctttcttcccttcctttctcgccacgttcgccggctttccccgtcaagctctaaatcgggggctccctttagggttccgatttagtgctttacggcacctcgaccccaaaaaacttgattagggtgatggttcacgtagtgggccatcgccctgatagacggtttttcgccctttgacgttggagtccacgttctttaatagtggactcttgttccaaactggaacaacactcaaccctatctcggtctattcttttgatttataagggattttgccgatttcggcctattggttaaaaaatgagctgatttaacaaaaatttaacgcgaattttaacaaaatattaacgcttacaatttaggtggcacttttcggggaaatgtgcgcggaacccctatttgtttatttttctaaatacattcaaatatgtatccgctcatgagacaataaccctgataaatgcttcaataatattgaaaaaggaagagtatgagtattcaacatttccgtgtcgcccttattcccttttttgcggcattttgccttcctgtttttgctcacccagaaacgctggtgaaagtaaaagatgctgaagatcagttgggtgcacgagtgggttacatcgaactggatctcaacagcggtaagatccttgagagttttcgccccgaagaacgttttccaatgatgagcacttttaaagttctgctatgtggcgcggtattatcccgtattgacgccgggcaagagcaactcggtcgccgcatacactattctcagaatgacttggttgagtactcaccagtcacagaaaagcatcttacggatggcatgacagtaagagaattatgcagtgctgccataaccatgagtgataacactgcggccaacttacttctgacaacgatcggaggaccgaaggagctaaccgcttttttgcacaacatgggggatcatgtaactcgccttgatcgttgggaaccggagctgaatgaagccataccaaacgacgagcgtgacaccacgatgcctgtagcaatggcaacaacgttgcgcaaactattaactggcgaactacttactctagcttcccggcaacaattaatagactggatggaggcggataaagttgcaggaccacttctgcgctcggcccttccggctggctggtttattgctgataaatctggagccggtgagcgtgggtctcgcggtatcattgcagcactggggccagatggtaagccctcccgtatcgtagttatctacacgacggggagtcaggcaactatggatgaacgaaatagacagatcgctgagataggtgcctcactgattaagcattggtaactgtcagaccaagtttactcatatatactttagattgatttaaaacttcatttttaatttaaaaggatctaggtgaagatcctttttgataatctcatgaccaaaatcccttaacgtgagttttcgttccactgagcgtcagaccccgtagaaaagatcaaaggatcttcttgagatcctttttttctgcgcgtaatctgctgcttgcaaacaaaaaaaccaccgctaccagcggtggtttgtttgccggatcaagagctaccaactctttttccgaaggtaactggcttcagcagagcgcagataccaaatactgttcttctagtgtagccgtagttaggccaccacttcaagaactctgtagcaccgcctacatacctcgctctgctaatcctgttaccagtggctgctgccagtggcgataagtcgtgtcttaccgggttggactcaagacgatagttaccggataaggcgcagcggtcgggctgaacggggggttcgtgcacacagcccagcttggagcgaacgacctacaccgaactgagatacctacagcgtgagctatgagaaagcgccacgcttcccgaagggagaaaggcggacaggtatccggtaagcggcagggtcggaacaggagagcgcacgagggagcttccagggggaaacgcctggtatctttatagtcctgtcgggtttcgccacctctgacttgagcgtcgatttttgtgatgctcgtcaggggggcggagcctatggaaaaacgccagcaacgcggcctttttacggttcctggccttttgctggccttttgctcacatgttctttcctgcgttatcccctgattctgtggataaccgtattaccgcctttgagtgagctgataccgctcgccgcagccgaacgaccgagcgcagcgagtcagtgagcgaggaagcggaagagcgcccaatacgcaaaccgcctctccccgcgcgttggccgattcattaatgcagctggcacgacaggtttcccgactggaaagcgggcagtgagcgcaacgcaattaatgtgagttagctcactcattaggcaccccaggctttacactttatgcttccggctcgtatgttgtgtggaattgtgagcggataacaatttcacacaggaaacagctatgaccatgattacgccagatttaattaag

SEQ ID NO: 627 - DNA, 4746 bp, Artificial Sequence
  Description of Artificial Sequence: Synthetic polynucleotide
gccttaattaggctgcgcgctcgctcgctcactgaggccgcccgggcaaagcccgggcgtcgggcgacctttggtcgcccggcctcagtgagcgagcgagcgcgcagagagggagtggccaactccatcactaggggttccttgtagttaatgattaacccgccatgctacttatctaccagggtaatggggatcctctagaactatagtccacggggttggggttgcgccttttccaaggcagccctgggtttgcgcagggacgcggctgctctgggcgtggttccgggaaacgcagcggcgccgaccctgggtctcgcacattcttcacgtccgttcgcagcgtcacccggatcttcgccgctacccttgtgggccccccggcgacgcttcctcgtccgcccctaagtcgggaaggttccttgcggttcgcggcgtgccggacgtgacaaacggaagccgcacgtctcactagtaccctcgcagacggacagcgccagggagcaatggcagcgcgccgaccgcgatgggctgtggccaatagcggctgctcagcagggcgcgccgagagcagcggccgggaaggggcggtgcgggaggcggggtgtggggcggtagtgtgggccctgttcctgcccgcgcggtgttccgcattctgcaagcctccggagcgcacgtcggcagtcggctccctcgttgaccgaatcaccgacctctctccccacgggagcaagcttgaactgaaaaaccagaaagttaactggtaagtttagtctttttgtcttttatttcaggtcccggatccggtggtggtgcaaatcaaagaactgctcctcagtggatgttgcctttacttctaggcctgtacggaagtgttacttctgctctaaaagctgcggaattgtacccgcggccgatccaccggtatgtggactctgggtcgcagagcggtggcaggcttgctggcatctccgtccccggctcaggcccagaccctgacacgggtgcccaggccggccgagctggctcctctgtgcggccggcgcggccttagaacagacattgacgcaacctgcacccccagaagagccagttccaaccagcgcgggttgaatcagatctggaacgtcaagaagcagagtgtgtaccttatgaatctccggaaaagtggcaccctcggacaccccggatccctcgatgaaaccacttatgagcgcctggccgaggaaaccctggattccctggctgagttcttcgaggacctggctgacaaaccctacaccttcgaagactacgacgtttccttcggaagtggggtgctgacggtcaaacttggtggcgatcttggaacctatgttataaacaagcagactcccaacaaacagatctggctcagctctccaagttcaggacccaagaggtatgactggacgggcaagaattgggtctattctcacgacggagtgagccttcatgaactgttggctgccgaactgacaaaagcccttaagacgaaactggacctgtcctcattggcgtactctggtaaggatgcctaactcgaggacggggtgaactacgcctgaggatccgatctttttccctctgccaaaaattatggggacatcatgaagccccttgagcatctgacttctggctaataaaggaaatttattttcattgcaatagtgtgttggaattttttgtgtctctcactcggaagcaattcgttgatctgaatttcgaccacccataatacccattaccctggtagataagtagcatggcgggttaatcattaactacaaggaacccctagtgatggagttggccactccctctctgcgcgctcgctcgctcactgaggccgggcgaccaaaggtcgcccgacgcccgggctttgcccgggcggcctcagtgagcgagcgagcgcgcagccttaattaacctaattcactggccgtcgttttacaacgtcgtgactgggaaaaccctggcgttacccaacttaatcgccttgcagcacatccccctttcgccagctggcgtaatagcgaagaggcccgcaccgatcgcccttcccaacagttgcgcagcctgaatggcgaatgggacgcgccctgtagcggcgcattaagcgcggcgggtgtggtggttacgcgcagcgtgaccgctacacttgccagcgccctagcgcccgctcctttcgctttcttcccttcctttctcgccacgttcgccggctttccccgtcaagctctaaatcgggggctccctttagggttccgatttagtgctttacggcacctcgaccccaaaaaacttgattagggtgatggttcacgtagtgggccatcgccctgatagacggtttttcgccctttgacgttggagtccacgttctttaatagtggactcttgttccaaactggaacaacactcaaccctatctcggtctattcttttgatttataagggattttgccgatttcggcctattggttaaaaaatgagctgatttaacaaaaatttaacgcgaattttaacaaaatattaacgcttacaatttaggtggcacttttcggggaaatgtgcgcggaacccctatttgtttatttttctaaatacattcaaatatgtatccgctcatgagacaataaccctgataaatgcttcaataatattgaaaaaggaagagtatgagtattcaacatttccgtgtcgcccttattcccttttttgcggcattttgccttcctgtttttgctcacccagaaacgctggtgaaagtaaaagatgctgaagatcagttgggtgcacgagtgggttacatcgaactggatctcaacagcggtaagatccttgagagttttcgccccgaagaacgttttccaatgatgagcacttttaaagttctgctatgtggcgcggtattatcccgtattgacgccgggcaagagcaactcggtcgccgcatacactattctcagaatgacttggttgagtactcaccagtcacagaaaagcatcttacggatggcatgacagtaagagaattatgcagtgctgccataaccatgagtgataacactgcggccaacttacttctgacaacgatcggaggaccgaaggagctaaccgcttttttgcacaacatgggggatcatgtaactcgccttgatcgttgggaaccggagctgaatgaagccataccaaacgacgagcgtgacaccacgatgcctgtagcaatggcaacaacgttgcgcaaactattaactggcgaactacttactctagcttcccggcaacaattaatagactggatggaggcggataaagttgcaggaccacttctgcgctcggcccttccggctggctggtttattgctgataaatctggagccggtgagcgtgggtctcgcggtatcattgcagcactggggccagatggtaagccctcccgtatcgtagttatctacacgacggggagtcaggcaactatggatgaacgaaatagacagatcgctgagataggtgcctcactgattaagcattggtaactgtcagaccaagtttactcatatatactttagattgatttaaaacttcatttttaatttaaaaggatctaggtgaagatcctttttgataatctcatgaccaaaatcccttaacgtgagttttcgttccactgagcgtcagaccccgtagaaaagatcaaaggatcttcttgagatcctttttttctgcgcgtaatctgctgcttgcaaacaaaaaaaccaccgctaccagcggtggtttgtttgccggatcaagagctaccaactctttttccgaaggtaactggcttcagcagagcgcagataccaaatactgttcttctagtgtagccgtagttaggccaccacttcaagaactctgtagcaccgcctacatacctcgctctgctaatcctgttaccagtggctgctgccagtggcgataagtcgtgtcttaccgggttggactcaagacgatagttaccggataaggcgcagcggtcgggctgaacggggggttcgtgcacacagcccagcttggagcgaacgacctacaccgaactgagatacctacagcgtgagctatgagaaagcgccacgcttcccgaagggagaaaggcggacaggtatccggtaagcggcagggtcggaacaggagagcgcacgagggagcttccagggggaaacgcctggtatctttatagtcctgtcgggtttcgccacctctgacttgagcgtcgatttttgtgatgctcgtcaggggggcggagcctatggaaaaacgccagcaacgcggcctttttacggttcctggccttttgctggccttttgctcacatgttctttcctgcgttatcccctgattctgtggataaccgtattaccgcctttgagtgagctgataccgctcgccgcagccgaacgaccgagcgcagcgagtcagtgagcgaggaagcggaagagcgcccaatacgcaaaccgcctctccccgcgcgttggccgattcattaatgcagctggcacgacaggtttcccgactggaaagcgggcagtgagcgcaacgcaattaatgtgagttagctcactcattaggcaccccaggctttacactttatgcttccggctcgtatgttgtgtggaattgtgagcggataacaatttcacacaggaaacagctatgaccatgattacgccagatttaattaag

SEQ ID NO: 628 - DNA, 4746 bp, Artificial Sequence
  Description of Artificial Sequence: Synthetic polynucleotide
gccttaattaggctgcgcgctcgctcgctcactgaggccgcccgggcaaagcccgggcgtcgggcgacctttggtcgcccggcctcagtgagcgagcgagcgcgcagagagggagtggccaactccatcactaggggttccttgtagttaatgattaacccgccatgctacttatctaccagggtaatggggatcctctagaactatagtccacggggttggggttgcgccttttccaaggcagccctgggtttgcgcagggacgcggctgctctgggcgtggttccgggaaacgcagcggcgccgaccctgggtctcgcacattcttcacgtccgttcgcagcgtcacccggatcttcgccgctacccttgtgggccccccggcgacgcttcctcgtccgcccctaagtcgggaaggttccttgcggttcgcggcgtgccggacgtgacaaacggaagccgcacgtctcactagtaccctcgcagacggacagcgccagggagcaatggcagcgcgccgaccgcgatgggctgtggccaatagcggctgctcagcagggcgcgccgagagcagcggccgggaaggggcggtgcgggaggcggggtgtggggcggtagtgtgggccctgttcctgcccgcgcggtgttccgcattctgcaagcctccggagcgcacgtcggcagtcggctccctcgttgaccgaatcaccgacctctctccccacgggagcaagcttgaactgaaaaaccagaaagttaactggtaagtttagtctttttgtcttttatttcaggtcccggatccggtggtggtgcaaatcaaagaactgctcctcagtggatgttgcctttacttctaggcctgtacggaagtgttacttctgctctaaaagctgcggaattgtacccgcggccgatccaccggtatgtggactctggggaggcgcgccgttgccggactcctggcatctccaagcccagcgcaggctcaaaccctcacgcgcgttcccaggccagccgagttggcccccctttgtggcaggcgcggcctgaggacagatatcgacgccacatgcactcctcgccgcgcctccagcaatcaaaggggtttgaaccaaatttggaacgtcaagaagcaatcagtgtatctcatgaatctgagaaagagcggcacactcggtcatcccggaagtctggacgaaaccacatacgaacggctcgccgaggaaacgctggatagcctggccgagtttttcgaggacctggctgataaaccgtatactttcgaagattatgacgtgtcattcgggagcggcgtactgaccgtcaaattgggcggtgacctggggacatacgtgattaacaagcagactcctaataaacagatttggttgagctctccttccagcgggcctaaacgctatgattggacagggaagaattgggtttacagtcacgacggagttagccttcacgagctcttggcagcggagctgacaaaggcgctcaagaccaaactcgacctgtcttcactcgcctattcaggcaaagacgcctgactcgaggacggggtgaactacgcctgaggatccgatctttttccctctgccaaaaattatggggacatcatgaagccccttgagcatctgacttctggctaataaaggaaatttattttcattgcaatagtgtgttggaattttttgtgtctctcactcggaagcaattcgttgatctgaatttcgaccacccataatacccattaccctggtagataagtagcatggcgggttaatcattaactacaaggaacccctagtgatggagttggccactccctctctgcgcgctcgctcgctcactgaggccgggcgaccaaaggtcgcccgacgcccgggctttgcccgggcggcctcagtgagcgagcgagcgcgcagccttaattaacctaattcactggccgtcgttttacaacgtcgtgactgggaaaaccctggcgttacccaacttaatcgccttgcagcacatccccctttcgccagctggcgtaatagcgaagaggcccgcaccgatcgcccttcccaacagttgcgcagcctgaatggcgaatgggacgcgccctgtagcggcgcattaagcgcggcgggtgtggtggttacgcgcagcgtgaccgctacacttgccagcgccctagcgcccgctcctttcgctttcttcccttcctttctcgccacgttcgccggctttccccgtcaagctctaaatcgggggctccctttagggttccgatttagtgctttacggcacctcgaccccaaaaaacttgattagggtgatggttcacgtagtgggccatcgccctgatagacggtttttcgccctttgacgttggagtccacgttctttaatagtggactcttgttccaaactggaacaacactcaaccctatctcggtctattcttttgatttataagggattttgccgatttcggcctattggttaaaaaatgagctgatttaacaaaaatttaacgcgaattttaacaaaatattaacgcttacaatttaggtggcacttttcggggaaatgtgcgcggaacccctatttgtttatttttctaaatacattcaaatatgtatccgctcatgagacaataaccctgataaatgcttcaataatattgaaaaaggaagagtatgagtattcaacatttccgtgtcgcccttattcccttttttgcggcattttgccttcctgtttttgctcacccagaaacgctggtgaaagtaaaagatgctgaagatcagttgggtgcacgagtgggttacatcgaactggatctcaacagcggtaagatccttgagagttttcgccccgaagaacgttttccaatgatgagcacttttaaagttctgctatgtggcgcggtattatcccgtattgacgccgggcaagagcaactcggtcgccgcatacactattctcagaatgacttggttgagtactcaccagtcacagaaaagcatcttacggatggcatgacagtaagagaattatgcagtgctgccataaccatgagtgataacactgcggccaacttacttctgacaacgatcggaggaccgaaggagctaaccgcttttttgcacaacatgggggatcatgtaactcgccttgatcgttgggaaccggagctgaatgaagccataccaaacgacgagcgtgacaccacgatgcctgtagcaatggcaacaacgttgcgcaaactattaactggcgaactacttactctagcttcccggcaacaattaatagactggatggaggcggataaagttgcaggaccacttctgcgctcggcccttccggctggctggtttattgctgataaatctggagccggtgagcgtgggtctcgcggtatcattgcagcactggggccagatggtaagccctcccgtatcgtagttatctacacgacggggagtcaggcaactatggatgaacgaaatagacagatcgctgagataggtgcctcactgattaagcattggtaactgtcagaccaagtttactcatatatactttagattgatttaaaacttcatttttaatttaaaaggatctaggtgaagatcctttttgataatctcatgaccaaaatcccttaacgtgagttttcgttccactgagcgtcagaccccgtagaaaagatcaaaggatcttcttgagatcctttttttctgcgcgtaatctgctgcttgcaaacaaaaaaaccaccgctaccagcggtggtttgtttgccggatcaagagctaccaactctttttccgaaggtaactggcttcagcagagcgcagataccaaatactgttcttctagtgtagccgtagttaggccaccacttcaagaactctgtagcaccgcctacatacctcgctctgctaatcctgttaccagtggctgctgccagtggcgataagtcgtgtcttaccgggttggactcaagacgatagttaccggataaggcgcagcggtcgggctgaacggggggttcgtgcacacagcccagcttggagcgaacgacctacaccgaactgagatacctacagcgtgagctatgagaaagcgccacgcttcccgaagggagaaaggcggacaggtatccggtaagcggcagggtcggaacaggagagcgcacgagggagcttccagggggaaacgcctggtatctttatagtcctgtcgggtttcgccacctctgacttgagcgtcgatttttgtgatgctcgtcaggggggcggagcctatggaaaaacgccagcaacgcggcctttttacggttcctggccttttgctggccttttgctcacatgttctttcctgcgttatcccctgattctgtggataaccgtattaccgcctttgagtgagctgataccgctcgccgcagccgaacgaccgagcgcagcgagtcagtgagcgaggaagcggaagagcgcccaatacgcaaaccgcctctccccgcgcgttggccgattcattaatgcagctggcacgacaggtttcccgactggaaagcgggcagtgagcgcaacgcaattaatgtgagttagctcactcattaggcaccccaggctttacactttatgcttccggctcgtatgttgtgtggaattgtgagcggataacaatttcacacaggaaacagctatgaccatgattacgccagatttaattaag

SEQ ID NO: 629 - DNA, 4746 bp, Artificial Sequence
  Description of Artificial Sequence: Synthetic polynucleotide
gccttaattaggctgcgcgctcgctcgctcactgaggccgcccgggcaaagcccgggcgtcgggcgacctttggtcgcccggcctcagtgagcgagcgagcgcgcagagagggagtggccaactccatcactaggggttccttgtagttaatgattaacccgccatgctacttatctaccagggtaatggggatcctctagaactatagtccacggggttggggttgcgccttttccaaggcagccctgggtttgcgcagggacgcggctgctctgggcgtggttccgggaaacgcagcggcgccgaccctgggtctcgcacattcttcacgtccgttcgcagcgtcacccggatcttcgccgctacccttgtgggccccccggcgacgcttcctcgtccgcccctaagtcgggaaggttccttgcggttcgcggcgtgccggacgtgacaaacggaagccgcacgtctcactagtaccctcgcagacggacagcgccagggagcaatggcagcgcgccgaccgcgatgggctgtggccaatagcggctgctcagcagggcgcgccgagagcagcggccgggaaggggcggtgcgggaggcggggtgtggggcggtagtgtgggccctgttcctgcccgcgcggtgttccgcattctgcaagcctccggagcgcacgtcggcagtcggctccctcgttgaccgaatcaccgacctctctccccacgggagcaagcttgaactgaaaaaccagaaagttaactggtaagtttagtctttttgtcttttatttcaggtcccggatccggtggtggtgcaaatcaaagaactgctcctcagtggatgttgcctttacttctaggcctgtacggaagtgttacttctgctctaaaagctgcggaattgtacccgcggccgatccaccggtatgtggacactcgggcgacgcgccgtggctgggctgcttgcttccccaagtcccgcacaggcgcaaaccctcacaagggtcccacggccagctgaattggccccgctgtgcggtcggaggggcctgcgaacagatatagacgcaacgtgcacccccagaagagcaagcagcaaccagagaggcctcaatcagatttggaacgtcaagaaacagagtgtctatctgatgaacctccgcaaatcagggacccttggtcatccgggatctcttgatgaaacgacctatgaacggctggctgaggagacgcttgactccctggcagagttcttcgaggatctggctgataagccatacacgttcgaggactatgatgtttcttttggttctggcgtcctgacggtgaaactcggaggggatctgggcacttacgttatcaacaaacagactcccaataaacagatttggttgtctagtcctagcagtggcccaaaacgctatgactggacgggcaagaactgggtgtactcccacgatggagttagcctgcacgaacttctggccgctgagcttactaaagcgctgaagactaagctggatctctccagcctcgcatacagcggcaaagacgcctagctcgaggacggggtgaactacgcctgaggatccgatctttttccctctgccaaaaattatggggacatcatgaagccccttgagcatctgacttctggctaataaaggaaatttattttcattgcaatagtgtgttggaattttttgtgtctctcactcggaagcaattcgttgatctgaatttcgaccacccataatacccattaccctggtagataagtagcatggcgggttaatcattaactacaaggaacccctagtgatggagttggccactccctctctgcgcgctcgctcgctcactgaggccgggcgaccaaaggtcgcccgacgcccgggctttgcccgggcggcctcagtgagcgagcgagcgcgcagccttaattaacctaattcactggccgtcgttttacaacgtcgtgactgggaaaaccctggcgttacccaacttaatcgccttgcagcacatccccctttcgccagctggcgtaatagcgaagaggcccgcaccgatcgcccttcccaacagttgcgcagcctgaatggcgaatgggacgcgccctgtagcggcgcattaagcgcggcgggtgtggtggttacgcgcagcgtgaccgctacacttgccagcgccctagcgcccgctcctttcgctttcttcccttcctttctcgccacgttcgccggctttccccgtcaagctctaaatcgggggctccctttagggttccgatttagtgctttacggcacctcgaccccaaaaaacttgattagggtgatggttcacgtagtgggccatcgccctgatagacggtttttcgccctttgacgttggagtccacgttctttaatagtggactcttgttccaaactggaacaacactcaaccctatctcggtctattcttttgatttataagggattttgccgatttcggcctattggttaaaaaatgagctgatttaacaaaaatttaacgcgaattttaacaaaatattaacgcttacaatttaggtggcacttttcggggaaatgtgcgcggaacccctatttgtttatttttctaaatacattcaaatatgtatccgctcatgagacaataaccctgataaatgcttcaataatattgaaaaaggaagagtatgagtattcaacatttccgtgtcgcccttattcccttttttgcggcattttgccttcctgtttttgctcacccagaaacgctggtgaaagtaaaagatgctgaagatcagttgggtgcacgagtgggttacatcgaactggatctcaacagcggtaagatccttgagagttttcgccccgaagaacgttttccaatgatgagcacttttaaagttctgctatgtggcgcggtattatcccgtattgacgccgggcaagagcaactcggtcgccgcatacactattctcagaatgacttggttgagtactcaccagtcacagaaaagcatcttacggatggcatgacagtaagagaattatgcagtgctgccataaccatgagtgataacactgcggccaacttacttctgacaacgatcggaggaccgaaggagctaaccgcttttttgcacaacatgggggatcatgtaactcgccttgatcgttgggaaccggagctgaatgaagccataccaaacgacgagcgtgacaccacgatgcctgtagcaatggcaacaacgttgcgcaaactattaactggcgaactacttactctagcttcccggcaacaattaatagactggatggaggcggataaagttgcaggaccacttctgcgctcggcccttccggctggctggtttattgctgataaatctggagccggtgagcgtgggtctcgcggtatcattgcagcactggggccagatggtaagccctcccgtatcgtagttatctacacgacggggagtcaggcaactatggatgaacgaaatagacagatcgctgagataggtgcctcactgattaagcattggtaactgtcagaccaagtttactcatatatactttagattgatttaaaacttcatttttaatttaaaaggatctaggtgaagatcctttttgataatctcatgaccaaaatcccttaacgtgagttttcgttccactgagcgtcagaccccgtagaaaagatcaaaggatcttcttgagatcctttttttctgcgcgtaatctgctgcttgcaaacaaaaaaaccaccgctaccagcggtggtttgtttgccggatcaagagctaccaactctttttccgaaggtaactggcttcagcagagcgcagataccaaatactgttcttctagtgtagccgtagttaggccaccacttcaagaactctgtagcaccgcctacatacctcgctctgctaatcctgttaccagtggctgctgccagtggcgataagtcgtgtcttaccgggttggactcaagacgatagttaccggataaggcgcagcggtcgggctgaacggggggttcgtgcacacagcccagcttggagcgaacgacctacaccgaactgagatacctacagcgtgagctatgagaaagcgccacgcttcccgaagggagaaaggcggacaggtatccggtaagcggcagggtcggaacaggagagcgcacgagggagcttccagggggaaacgcctggtatctttatagtcctgtcgggtttcgccacctctgacttgagcgtcgatttttgtgatgctcgtcaggggggcggagcctatggaaaaacgccagcaacgcggcctttttacggttcctggccttttgctggccttttgctcacatgttctttcctgcgttatcccctgattctgtggataaccgtattaccgcctttgagtgagctgataccgctcgccgcagccgaacgaccgagcgcagcgagtcagtgagcgaggaagcggaagagcgcccaatacgcaaaccgcctctccccgcgcgttggccgattcattaatgcagctggcacgacaggtttcccgactggaaagcgggcagtgagcgcaacgcaattaatgtgagttagctcactcattaggcaccccaggctttacactttatgcttccggctcgtatgttgtgtggaattgtgagcggataacaatttcacacaggaaacagctatgaccatgattacgccagatttaattaag

SEQ ID NO: 630 - DNA, 4746 bp, Artificial Sequence
  Description of Artificial Sequence: Synthetic polynucleotide
gccttaattaggctgcgcgctcgctcgctcactgaggccgcccgggcaaagcccgggcgtcgggcgacctttggtcgcccggcctcagtgagcgagcgagcgcgcagagagggagtggccaactccatcactaggggttccttgtagttaatgattaacccgccatgctacttatctaccagggtaatggggatcctctagaactatagtccacggggttggggttgcgccttttccaaggcagccctgggtttgcgcagggacgcggctgctctgggcgtggttccgggaaacgcagcggcgccgaccctgggtctcgcacattcttcacgtccgttcgcagcgtcacccggatcttcgccgctacccttgtgggccccccggcgacgcttcctcgtccgcccctaagtcgggaaggttccttgcggttcgcggcgtgccggacgtgacaaacggaagccgcacgtctcactagtaccctcgcagacggacagcgccagggagcaatggcagcgcgccgaccgcgatgggctgtggccaatagcggctgctcagcagggcgcgccgagagcagcggccgggaaggggcggtgcgggaggcggggtgtggggcggtagtgtgggccctgttcctgcccgcgcggtgttccgcattctgcaagcctccggagcgcacgtcggcagtcggctccctcgttgaccgaatcaccgacctctctccccacgggagcaagcttgaactgaaaaaccagaaagttaactggtaagtttagtctttttgtcttttatttcaggtcccggatccggtggtggtgcaaatcaaagaactgctcctcagtggatgttgcctttacttctaggcctgtacggaagtgttacttctgctctaaaagctgcggaattgtacccgcggccgatccaccggtatgtggactctgggtcgacgcgccgtagccggtctcttggcctccccatcccctgcgcaggcacagacccttacacgagttccacggcccgctgaactggcaccactctgcggacgccggggcctgagaaccgatattgacgctacgtgcactccccgacgagcctcttctaatcagagggggctcaaccagatctggaacgtgaagaagcagtcagtctacttgatgaatctgagaaagagcgggacccttgggcaccccgggtctctcgacgagactacatacgagaggctggccgaggagactttggactctctcgccgaattcttcgaggatttggcagacaagccgtacacctttgaagactacgatgtctcattcggatcaggggtgctgacggttaaactggggggcgatctcggaacctacgtcataaacaaacagacacccaataagcagatctggttgtctagcccatcatccggtcctaaacggtacgactggaccggcaagaactgggtctactcccatgacggagtcagtcttcatgaactgcttgccgcagagctgaccaaggctcttaagacgaaactggatctctctagcctggcctactccgggaaggatgcatagctcgaggacggggtgaactacgcctgaggatccgatctttttccctctgccaaaaattatggggacatcatgaagccccttgagcatctgacttctggctaataaaggaaatttattttcattgcaatagtgtgttggaattttttgtgtctctcactcggaagcaattcgttgatctgaatttcgaccacccataatacccattaccctggtagataagtagcatggcgggttaatcattaactacaaggaacccctagtgatggagttggccactccctctctgcgcgctcgctcgctcactgaggccgggcgaccaaaggtcgcccgacgcccgggctttgcccgggcggcctcagtgagcgagcgagcgcgcagccttaattaacctaattcactggccgtcgttttacaacgtcgtgactgggaaaaccctggcgttacccaacttaatcgccttgcagcacatccccctttcgccagctggcgtaatagcgaagaggcccgcaccgatcgcccttcccaacagttgcgcagcctgaatggcgaatgggacgcgccctgtagcggcgcattaagcgcggcgggtgtggtggttacgcgcagcgtgaccgctacacttgccagcgccctagcgcccgctcctttcgctttcttcccttcctttctcgccacgttcgccggctttccccgtcaagctctaaatcgggggctccctttagggttccgatttagtgctttacggcacctcgaccccaaaaaacttgattagggtgatggttcacgtagtgggccatcgccctgatagacggtttttcgccctttgacgttggagtccacgttctttaatagtggactcttgttccaaactggaacaacactcaaccctatctcggtctattcttttgatttataagggattttgccgatttcggcctattggttaaaaaatgagctgatttaacaaaaatttaacgcgaattttaacaaaatattaacgcttacaatttaggtggcacttttcggggaaatgtgcgcggaacccctatttgtttatttttctaaatacattcaaatatgtatccgctcatgagacaataaccctgataaatgcttcaataatattgaaaaaggaagagtatgagtattcaacatttccgtgtcgcccttattcccttttttgcggcattttgccttcctgtttttgctcacccagaaacgctggtgaaagtaaaagatgctgaagatcagttgggtgcacgagtgggttacatcgaactggatctcaacagcggtaagatccttgagagttttcgccccgaagaacgttttccaatgatgagcacttttaaagttctgctatgtggcgcggtattatcccgtattgacgccgggcaagagcaactcggtcgccgcatacactattctcagaatgacttggttgagtactcaccagtcacagaaaagcatcttacggatggcatgacagtaagagaattatgcagtgctgccataaccatgagtgataacactgcggccaacttacttctgacaacgatcggaggaccgaaggagctaaccgcttttttgcacaacatgggggatcatgtaactcgccttgatcgttgggaaccggagctgaatgaagccataccaaacgacgagcgtgacaccacgatgcctgtagcaatggcaacaacgttgcgcaaactattaactggcgaactacttactctagcttcccggcaacaattaatagactggatggaggcggataaagttgcaggaccacttctgcgctcggcccttccggctggctggtttattgctgataaatctggagccggtgagcgtgggtctcgcggtatcattgcagcactggggccagatggtaagccctcccgtatcgtagttatctacacgacggggagtcaggcaactatggatgaacgaaatagacagatcgctgagataggtgcctcactgattaagcattggtaactgtcagaccaagtttactcatatatactttagattgatttaaaacttcatttttaatttaaaaggatctaggtgaagatcctttttgataatctcatgaccaaaatcccttaacgtgagttttcgttccactgagcgtcagaccccgtagaaaagatcaaaggatcttcttgagatcctttttttctgcgcgtaatctgctgcttgcaaacaaaaaaaccaccgctaccagcggtggtttgtttgccggatcaagagctaccaactctttttccgaaggtaactggcttcagcagagcgcagataccaaatactgttcttctagtgtagccgtagttaggccaccacttcaagaactctgtagcaccgcctacatacctcgctctgctaatcctgttaccagtggctgctgccagtggcgataagtcgtgtcttaccgggttggactcaagacgatagttaccggataaggcgcagcggtcgggctgaacggggggttcgtgcacacagcccagcttggagcgaacgacctacaccgaactgagatacctacagcgtgagctatgagaaagcgccacgcttcccgaagggagaaaggcggacaggtatccggtaagcggcagggtcggaacaggagagcgcacgagggagcttccagggggaaacgcctggtatctttatagtcctgtcgggtttcgccacctctgacttgagcgtcgatttttgtgatgctcgtcaggggggcggagcctatggaaaaacgccagcaacgcggcctttttacggttcctggccttttgctggccttttgctcacatgttctttcctgcgttatcccctgattctgtggataaccgtattaccgcctttgagtgagctgataccgctcgccgcagccgaacgaccgagcgcagcgagtcagtgagcgaggaagcggaagagcgcccaatacgcaaaccgcctctccccgcgcgttggccgattcattaatgcagctggcacgacaggtttcccgactggaaagcgggcagtgagcgcaacgcaattaatgtgagttagctcactcattaggcaccccaggctttacactttatgcttccggctcgtatgttgtgtggaattgtgagcggataacaatttcacacaggaaacagctatgaccatgattacgccagatttaattaag

SEQ ID NO: 631 - DNA, 4550 bp, Artificial Sequence
  Description of Artificial Sequence: Synthetic polynucleotide
gccttaattaggctgcgcgctcgctcgctcactgaggccgcccgggcaaagcccgggcgtcgggcgacctttggtcgcccggcctcagtgagcgagcgagcgcgcagagagggagtggccaactccatcactaggggttccttgtagttaatgattaacccgccatgctacttatctaccagggtaatggggatcctctagaactatagctagtcgacggtgtggaaagtccccaggctccccagcaggcagaagtatgcaaagcatgcatctcaattagtcagcaaccaggtgtggaaagtccccaggctccccagcaggcagaagtatgcaaagcatgcatctcaattagtcagcaaccatagtcccgcccctaactccgcccatcccgcccctaactccgcccagttccgcccattctccgccccatggctgactaattttttttatttatgcagaggccgaggccgcctcggcctctgagctattccagaagtagtgaggaggcttttttggaggcctaggcttttgcaaaaagcttgaactgaaaaaccagaaagttaactggtaagtttagtctttttgtcttttatttcaggtcccggatccggtggtggtgcaaatcaaagaactgctcctcagtggatgttgcctttacttctaggcctgtacggaagtgttacttctgctctaaaagctgcggaattgtacccgcggccgatccaccggtatgtggactctcgggcgccgcgcagtagccggcctcctggcgtcacccagcccagcccaggcccagaccctcacccgggtcccgcggccggcagagttggccccactctgcggccgccgtggcctgcgcaccgacatcgatgcgacctgcacgccccgccgcgcaagttcgaaccaacgtggcctcaaccagatttggaatgtcaaaaagcagagtgtctatttgatgaatttgaggaaatctggaactttgggccacccaggctctctagatgagaccacctatgaaagactagcagaggaaacgctggactctttagcagagttttttgaagaccttgcagacaagccatacacgtttgaggactatgatgtctcctttgggagtggtgtcttaactgtcaaactgggtggagatctaggaacctatgtgatcaacaagcagacgccaaacaagcaaatctggctatcttctccatccagtggacctaagcgttatgactggactgggaaaaactgggtgtactcccacgacggcgtgtccctccatgagctgctggccgcagagctcactaaagccttaaaaaccaaactggacttgtcttccttggcctattccggaaaagatgcttgactcgaggacggggtgaactacgcctgaggatccgatctttttccctctgccaaaaattatggggacatcatgaagccccttgagcatctgacttctggctaataaaggaaatttattttcattgcaatagtgtgttggaattttttgtgtctctcactcggaagcaattcgttgatctgaatttcgaccacccataatacccattaccctggtagataagtagcatggcgggttaatcattaactacaaggaacccctagtgatggagttggccactccctctctgcgcgctcgctcgctcactgaggccgggcgaccaaaggtcgcccgacgcccgggctttgcccgggcggcctcagtgagcgagcgagcgcgcagccttaattaacctaattcactggccgtcgttttacaacgtcgtgactgggaaaaccctggcgttacccaacttaatcgccttgcagcacatccccctttcgccagctggcgtaatagcgaagaggcccgcaccgatcgcccttcccaacagttgcgcagcctgaatggcgaatgggacgcgccctgtagcggcgcattaagcgcggcgggtgtggtggttacgcgcagcgtgaccgctacacttgccagcgccctagcgcccgctcctttcgctttcttcccttcctttctcgccacgttcgccggctttccccgtcaagctctaaatcgggggctccctttagggttccgatttagtgctttacggcacctcgaccccaaaaaacttgattagggtgatggttcacgtagtgggccatcgccctgatagacggtttttcgccctttgacgttggagtccacgttctttaatagtggactcttgttccaaactggaacaacactcaaccctatctcggtctattcttttgatttataagggattttgccgatttcggcctattggttaaaaaatgagctgatttaacaaaaatttaacgcgaattttaacaaaatattaacgcttacaatttaggtggcacttttcggggaaatgtgcgcggaacccctatttgtttatttttctaaatacattcaaatatgtatccgctcatgagacaataaccctgataaatgcttcaataatattgaaaaaggaagagtatgagtattcaacatttccgtgtcgcccttattcccttttttgcggcattttgccttcctgtttttgctcacccagaaacgctggtgaaagtaaaagatgctgaagatcagttgggtgcacgagtgggttacatcgaactggatctcaacagcggtaagatccttgagagttttcgccccgaagaacgttttccaatgatgagcacttttaaagttctgctatgtggcgcggtattatcccgtattgacgccgggcaagagcaactcggtcgccgcatacactattctcagaatgacttggttgagtactcaccagtcacagaaaagcatcttacggatggcatgacagtaagagaattatgcagtgctgccataaccatgagtgataacactgcggccaacttacttctgacaacgatcggaggaccgaaggagctaaccgcttttttgcacaacatgggggatcatgtaactcgccttgatcgttgggaaccggagctgaatgaagccataccaaacgacgagcgtgacaccacgatgcctgtagcaatggcaacaacgttgcgcaaactattaactggcgaactacttactctagcttcccggcaacaattaatagactggatggaggcggataaagttgcaggaccacttctgcgctcggcccttccggctggctggtttattgctgataaatctggagccggtgagcgtgggtctcgcggtatcattgcagcactggggccagatggtaagccctcccgtatcgtagttatctacacgacggggagtcaggcaactatggatgaacgaaatagacagatcgctgagataggtgcctcactgattaagcattggtaactgtcagaccaagtttactcatatatactttagattgatttaaaacttcatttttaatttaaaaggatctaggtgaagatcctttttgataatctcatgaccaaaatcccttaacgtgagttttcgttccactgagcgtcagaccccgtagaaaagatcaaaggatcttcttgagatcctttttttctgcgcgtaatctgctgcttgcaaacaaaaaaaccaccgctaccagcggtggtttgtttgccggatcaagagctaccaactctttttccgaaggtaactggcttcagcagagcgcagataccaaatactgttcttctagtgtagccgtagttaggccaccacttcaagaactctgtagcaccgcctacatacctcgctctgctaatcctgttaccagtggctgctgccagtggcgataagtcgtgtcttaccgggttggactcaagacgatagttaccggataaggcgcagcggtcgggctgaacggggggttcgtgcacacagcccagcttggagcgaacgacctacaccgaactgagatacctacagcgtgagctatgagaaagcgccacgcttcccgaagggagaaaggcggacaggtatccggtaagcggcagggtcggaacaggagagcgcacgagggagcttccagggggaaacgcctggtatctttatagtcctgtcgggtttcgccacctctgacttgagcgtcgatttttgtgatgctcgtcaggggggcggagcctatggaaaaacgccagcaacgcggcctttttacggttcctggccttttgctggccttttgctcacatgttctttcctgcgttatcccctgattctgtggataaccgtattaccgcctttgagtgagctgataccgctcgccgcagccgaacgaccgagcgcagcgagtcagtgagcgaggaagcggaagagcgcccaatacgcaaaccgcctctccccgcgcgttggccgattcattaatgcagctggcacgacaggtttcccgactggaaagcgggcagtgagcgcaacgcaattaatgtgagttagctcactcattaggcaccccaggctttacactttatgcttccggctcgtatgttgtgtggaattgtgagcggataacaatttcacacaggaaacagctatgaccatgattacgccagatttaattaag

SEQ ID NO: 632 - DNA, 4824 bp, Artificial Sequence
  Description of Artificial Sequence: Synthetic polynucleotide
ctgcgcgctcgctcgctcactgaggccgcccgggcaaagcccgggcgtcgggcgacctttggtcgcccggcctcagtgagcgagcgagcgcgcagagagggagtgtagccatgctctaggaagatcaattcaattcacgcgtcgacattgattattgactagttattaatagtaatcaattacggggtcattagttcatagcccatatatggagttccgcgttacataacttacggtaaatggcccgcctggctgaccgcccaacgacccccgcccattgacgtcaataatgacgtatgttcccatagtaacgccaatagggactttccattgacgtcaatgggtggagtatttacggtaaactgcccacttggcagtacatcaagtgtatcatatgccaagtacgccccctattgacgtcaatgacggtaaatggcccgcctggcattatgcccagtacatgaccttatgggactttcctacttggcagtacatctacgtattagtcatcgctattaccatgtcgaggccacgttctgcttcactctccccatctcccccccctccccacccccaattttgtatttatttattttttaattattttgtgcagcgatgggggcggggggggggggcgcgcgccaggcggggcggggcggggcgaggggcggggcggggcgaggcggagaggtgcggcggcagccaatcagagcggcgcgctccgaaagtttccttttatggcgaggcggcggcggcggcggccctataaaaagcgaagcgcgcggcgggcgggagcaagcttgaactgaaaaaccagaaagttaactggtaagtttagtctttttgtcttttatttcaggtcccggatccggtggtggtgcaaatcaaagaactgctcctcagtggatgttgcctttacttctaggcctgtacggaagtgttacttctgctctaaaagctgcggaattgtacccgcggccgatccaccggtatgtggactctcgggcgccgcgcagtagccggcctcctggcgtcacccagcccagcccaggcccagaccctcacccgggtcccgcggccggcagagttggccccactctgcggccgccgtggcctgcgcaccgacatcgatgcgacctgcacgccccgccgcgcaagttcgaaccaacgtggcctcaaccagatttggaatgtcaaaaagcagagtgtctatttgatgaatttgaggaaatctggaactttgggccacccaggctctctagatgagaccacctatgaaagactagcagaggaaacgctggactctttagcagagttttttgaagaccttgcagacaagccatacacgtttgaggactatgatgtctcctttgggagtggtgtcttaactgtcaaactgggtggagatctaggaacctatgtgatcaacaagcagacgccaaacaagcaaatctggctatcttctccatccagtggacctaagcgttatgactggactgggaaaaactgggtgtactcccacgacggcgtgtccctccatgagctgctggccgcagagctcactaaagccttaaaaaccaaactggacttgtcttccttggcctattccggaaaagatgcttgagcggccctagcgtttaaacgggccctctagagtcgacccgggcggcctcgaggacggggtgaactacgcctgaggatccgatctttttccctctgccaaaaattatggggacatcatgaagccccttgagcatctgacttctggctaataaaggaaatttattttcattgcaatagtgtgttggaattttttgtgtctctcactcggcctaggtagataagtagcatggcgggttaatcattaactacaaggaacccctagtgatggagttggccactccctctctgcgcgctcgctcgctcactgaggccgggcgaccaaaggtcgcccgacgcccgggctttgcccgggcggcctcagtgagcgagcgagcgcgcagccttaattaacctaattcactggccgtcgttttacaacgtcgtgactgggaaaaccctggcgttacccaacttaatcgccttgcagcacatccccctttcgccagctggcgtaatagcgaagaggcccgcaccgatcgcccttcccaacagttgcgcagcctgaatggcgaatgggacgcgccctgtagcggcgcattaagcgcggcgggtgtggtggttacgcgcagcgtgaccgctacacttgccagcgccctagcgcccgctcctttcgctttcttcccttcctttctcgccacgttcgccggctttccccgtcaagctctaaatcgggggctccctttagggttccgatttagtgctttacggcacctcgaccccaaaaaacttgattagggtgatggttcacgtagtgggccatcgccctgatagacggtttttcgccctttgacgttggagtccacgttctttaatagtggactcttgttccaaactggaacaacactcaaccctatctcggtctattcttttgatttataagggattttgccgatttcggcctattggttaaaaaatgagctgatttaacaaaaatttaacgcgaattttaacaaaatattaacgcttacaatttaggtggcacttttcggggaaatgtgcgcggaacccctatttgtttatttttctaaatacattcaaatatgtatccgctcatgagacaataaccctgataaatgcttcaataatattgaaaaaggaagagtatgagtattcaacatttccgtgtcgcccttattcccttttttgcggcattttgccttcctgtttttgctcacccagaaacgctggtgaaagtaaaagatgctgaagatcagttgggtgcacgagtgggttacatcgaactggatctcaacagcggtaagatccttgagagttttcgccccgaagaacgttttccaatgatgagcacttttaaagttctgctatgtggcgcggtattatcccgtattgacgccgggcaagagcaactcggtcgccgcatacactattctcagaatgacttggttgagtactcaccagtcacagaaaagcatcttacggatggcatgacagtaagagaattatgcagtgctgccataaccatgagtgataacactgcggccaacttacttctgacaacgatcggaggaccgaaggagctaaccgcttttttgcacaacatgggggatcatgtaactcgccttgatcgttgggaaccggagctgaatgaagccataccaaacgacgagcgtgacaccacgatgcctgtagcaatggcaacaacgttgcgcaaactattaactggcgaactacttactctagcttcccggcaacaattaatagactggatggaggcggataaagttgcaggaccacttctgcgctcggcccttccggctggctggtttattgctgataaatctggagccggtgagcgtgggtctcgcggtatcattgcagcactggggccagatggtaagccctcccgtatcgtagttatctacacgacggggagtcaggcaactatggatgaacgaaatagacagatcgctgagataggtgcctcactgattaagcattggtaactgtcagaccaagtttactcatatatactttagattgatttaaaacttcatttttaatttaaaaggatctaggtgaagatcctttttgataatctcatgaccaaaatcccttaacgtgagttttcgttccactgagcgtcagaccccgtagaaaagatcaaaggatcttcttgagatcctttttttctgcgcgtaatctgctgcttgcaaacaaaaaaaccaccgctaccagcggtggtttgtttgccggatcaagagctaccaactctttttccgaaggtaactggcttcagcagagcgcagataccaaatactgttcttctagtgtagccgtagttaggccaccacttcaagaactctgtagcaccgcctacatacctcgctctgctaatcctgttaccagtggctgctgccagtggcgataagtcgtgtcttaccgggttggactcaagacgatagttaccggataaggcgcagcggtcgggctgaacggggggttcgtgcacacagcccagcttggagcgaacgacctacaccgaactgagatacctacagcgtgagctatgagaaagcgccacgcttcccgaagggagaaaggcggacaggtatccggtaagcggcagggtcggaacaggagagcgcacgagggagcttccagggggaaacgcctggtatctttatagtcctgtcgggtttcgccacctctgacttgagcgtcgatttttgtgatgctcgtcaggggggcggagcctatggaaaaacgccagcaacgcggcctttttacggttcctggccttttgctggccttttgctcacatgttctttcctgcgttatcccctgattctgtggataaccgtattaccgcctttgagtgagctgataccgctcgccgcagccgaacgaccgagcgcagcgagtcagtgagcgaggaagcggaagagcgcccaatacgcaaaccgcctctccccgcgcgttggccgattcattaatgcagctggcacgacaggtttcccgactggaaagcgggcagtgagcgcaacgcaattaatgtgagttagctcactcattaggcaccccaggctttacactttatgcttccggctcgtatgttgtgtggaattgtgagcggataacaatttcacacaggaaacagctatgaccatgattacgccagatttaattaaggccttaattagg

SEQ ID NO: 633 - DNA, 4805 bp, Artificial Sequence
  Description of Artificial Sequence: Synthetic polynucleotide
ctgcgcgctcgctcgctcactgaggccgcccgggcaaagcccgggcgtcgggcgacctttggtcgcccggcctcagtgagcgagcgagcgcgcagagagggagtgtagccatgctctaggaagatcaattcaattcacgcgtcgacattgattattgactagttattaatagtaatcaattacggggtcattagttcatagcccatatatggagttccgcgttacataacttacggtaaatggcccgcctggctgaccgcccaacgacccccgcccattgacgtcaataatgacgtatgttcccatagtaacgccaatagggactttccattgacgtcaatgggtggagtatttacggtaaactgcccacttggcagtacatcaagtgtatcatatgccaagtacgccccctattgacgtcaatgacggtaaatggcccgcctggcattatgcccagtacatgaccttatgggactttcctacttggcagtacatctacgtattagtcatcgctattaccatgtcgaggccacgttctgcttcactctccccatctcccccccctccccacccccaattttgtatttatttattttttaattattttgtgcagcgatgggggcggggggggggggcgcgcgccaggcggggcggggcggggcgaggggcggggcggggcgaggcggagaggtgcggcggcagccaatcagagcggcgcgctccgaaagtttccttttatggcgaggcggcggcggcggcggccctataaaaagcgaagcgcgcggcgggcgggagcaagcttgaactgaaaaaccagaaagttaactggtaagtttagtctttttgtcttttatttcaggtcccggatccggtggtggtgcaaatcaaagaactgctcctcagtggatgttgcctttacttctaggcctgtacggaagtgttacttctgctctaaaagctgcggaattgtacccgcggccgatccaccggtatgtggactctcgggcgccgcgcagtagccggcctcctggcgtcacccagcccagcccaggcccagaccctcacccgggtcccgcggccggcagagttggccccactctgcggccgccgtggcctgcgcaccgacatcgatgcgacctgcacgccccgccgcgcaagttcgaaccaacgtggcctcaaccagatttggaatgtcaaaaagcagagtgtctatttgatgaatttgaggaaatctggaactttgggccacccaggctctctagatgagaccacctatgaaagactagcagaggaaacgctggactctttagcagagttttttgaagaccttgcagacaagccatacacgtttgaggactatgatgtctcctttgggagtggtgtcttaactgtcaaactgggtggagatctaggaacctatgtgatcaacaagcagacgccaaacaagcaaatctggctatcttctccatccagtggacctaagcgttatgactggactgggaaaaactgggtgtactcccacgacggcgtgtccctccatgagctgctggccgcagagctcactaaagccttaaaaaccaaactggacttgtcttccttggcctattccggaaaagatgcttatccttatgacgtgcctgactatgcctgactcgaggacggggtgaactacgcctgaggatccgatctttttccctctgccaaaaattatggggacatcatgaagccccttgagcatctgacttctggctaataaaggaaatttattttcattgcaatagtgtgttggaattttttgtgtctctcactcggcctaggtagataagtagcatggcgggttaatcattaactacaaggaacccctagtgatggagttggccactccctctctgcgcgctcgctcgctcactgaggccgggcgaccaaaggtcgcccgacgcccgggctttgcccgggcggcctcagtgagcgagcgagcgcgcagccttaattaacctaattcactggccgtcgttttacaacgtcgtgactgggaaaaccctggcgttacccaacttaatcgccttgcagcacatccccctttcgccagctggcgtaatagcgaagaggcccgcaccgatcgcccttcccaacagttgcgcagcctgaatggcgaatgggacgcgccctgtagcggcgcattaagcgcggcgggtgtggtggttacgcgcagcgtgaccgctacacttgccagcgccctagcgcccgctcctttcgctttcttcccttcctttctcgccacgttcgccggctttccccgtcaagctctaaatcgggggctccctttagggttccgatttagtgctttacggcacctcgaccccaaaaaacttgattagggtgatggttcacgtagtgggccatcgccctgatagacggtttttcgccctttgacgttggagtccacgttctttaatagtggactcttgttccaaactggaacaacactcaaccctatctcggtctattcttttgatttataagggattttgccgatttcggcctattggttaaaaaatgagctgatttaacaaaaatttaacgcgaattttaacaaaatattaacgcttacaatttaggtggcacttttcggggaaatgtgcgcggaacccctatttgtttatttttctaaatacattcaaatatgtatccgctcatgagacaataaccctgataaatgcttcaataatattgaaaaaggaagagtatgagtattcaacatttccgtgtcgcccttattcccttttttgcggcattttgccttcctgtttttgctcacccagaaacgctggtgaaagtaaaagatgctgaagatcagttgggtgcacgagtgggttacatcgaactggatctcaacagcggtaagatccttgagagttttcgccccgaagaacgttttccaatgatgagcacttttaaagttctgctatgtggcgcggtattatcccgtattgacgccgggcaagagcaactcggtcgccgcatacactattctcagaatgacttggttgagtactcaccagtcacagaaaagcatcttacggatggcatgacagtaagagaattatgcagtgctgccataaccatgagtgataacactgcggccaacttacttctgacaacgatcggaggaccgaaggagctaaccgcttttttgcacaacatgggggatcatgtaactcgccttgatcgttgggaaccggagctgaatgaagccataccaaacgacgagcgtgacaccacgatgcctgtagcaatggcaacaacgttgcgcaaactattaactggcgaactacttactctagcttcccggcaacaattaatagactggatggaggcggataaagttgcaggaccacttctgcgctcggcccttccggctggctggtttattgctgataaatctggagccggtgagcgtgggtctcgcggtatcattgcagcactggggccagatggtaagccctcccgtatcgtagttatctacacgacggggagtcaggcaactatggatgaacgaaatagacagatcgctgagataggtgcctcactgattaagcattggtaactgtcagaccaagtttactcatatatactttagattgatttaaaacttcatttttaatttaaaaggatctaggtgaagatcctttttgataatctcatgaccaaaatcccttaacgtgagttttcgttccactgagcgtcagaccccgtagaaaagatcaaaggatcttcttgagatcctttttttctgcgcgtaatctgctgcttgcaaacaaaaaaaccaccgctaccagcggtggtttgtttgccggatcaagagctaccaactctttttccgaaggtaactggcttcagcagagcgcagataccaaatactgttcttctagtgtagccgtagttaggccaccacttcaagaactctgtagcaccgcctacatacctcgctctgctaatcctgttaccagtggctgctgccagtggcgataagtcgtgtcttaccgggttggactcaagacgatagttaccggataaggcgcagcggtcgggctgaacggggggttcgtgcacacagcccagcttggagcgaacgacctacaccgaactgagatacctacagcgtgagctatgagaaagcgccacgcttcccgaagggagaaaggcggacaggtatccggtaagcggcagggtcggaacaggagagcgcacgagggagcttccagggggaaacgcctggtatctttatagtcctgtcgggtttcgccacctctgacttgagcgtcgatttttgtgatgctcgtcaggggggcggagcctatggaaaaacgccagcaacgcggcctttttacggttcctggccttttgctggccttttgctcacatgttctttcctgcgttatcccctgattctgtggataaccgtattaccgcctttgagtgagctgataccgctcgccgcagccgaacgaccgagcgcagcgagtcagtgagcgaggaagcggaagagcgcccaatacgcaaaccgcctctccccgcgcgttggccgattcattaatgcagctggcacgacaggtttcccgactggaaagcgggcagtgagcgcaacgcaattaatgtgagttagctcactcattaggcaccccaggctttacactttatgcttccggctcgtatgttgtgtggaattgtgagcggataacaatttcacacaggaaacagctatgaccatgattacgccagatttaattaaggccttaattagg

SEQ ID NO: 634 - DNA, 4850 bp, Artificial Sequence
  Description of Artificial Sequence: Synthetic polynucleotide
ctgcgcgctcgctcgctcactgaggccgcccgggcaaagcccgggcgtcgggcgacctttggtcgcccggcctcagtgagcgagcgagcgcgcagagagggagtgtagccatgctctaggaagatcaattcaattcacgcgtcgacattgattattgactagttattaatagtaatcaattacggggtcattagttcatagcccatatatggagttccgcgttacataacttacggtaaatggcccgcctggctgaccgcccaacgacccccgcccattgacgtcaataatgacgtatgttcccatagtaacgccaatagggactttccattgacgtcaatgggtggagtatttacggtaaactgcccacttggcagtacatcaagtgtatcatatgccaagtacgccccctattgacgtcaatgacggtaaatggcccgcctggcattatgcccagtacatgaccttatgggactttcctacttggcagtacatctacgtattagtcatcgctattaccatgtcgaggccacgttctgcttcactctccccatctcccccccctccccacccccaattttgtatttatttattttttaattattttgtgcagcgatgggggcggggggggggggcgcgcgccaggcggggcggggcggggcgaggggcggggcggggcgaggcggagaggtgcggcggcagccaatcagagcggcgcgctccgaaagtttccttttatggcgaggcggcggcggcggcggccctataaaaagcgaagcgcgcggcgggcgggagcaagcttgaactgaaaaaccagaaagttaactggtaagtttagtctttttgtcttttatttcaggtcccggatccggtggtggtgcaaatcaaagaactgctcctcagtggatgttgcctttacttctaggcctgtacggaagtgttacttctgctctaaaagctgcggaattgtacccgcggccgatccaccggtatgtggactctcgggcgccgcgcagtagccggcctcctggcgtcacccagcccagcccaggcccagaccctcacccgggtcccgcggccggcagagttggccccactctgcggccgccgtggcctgcgcaccgacatcgatgcgacctgcacgccccgccgcgcaagttcgaaccaacgtggcctcaaccagatttggaatgtcaaaaagcagagtgtctatttgatgaatttgaggaaatctggaactttgggccacccaggctctctagatgagaccacctatgaaagactagcagaggaaacgctggactctttagcagagttttttgaagaccttgcagacaagccatacacgtttgaggactatgatgtctcctttgggagtggtgtcttaactgtcaaactgggtggagatctaggaacctatgtgatcaacaagcagacgccaaacaagcaaatctggctatcttctccatccagtggacctaagcgttatgactggactgggaaaaactgggtgtactcccacgacggcgtgtccctccatgagctgctggccgcagagctcactaaagccttaaaaaccaaactggacttgtcttccttggcctattccggaaaagatgctggatccgactacaaagaccatgacggtgattataaagatcatgacatcgactacaaggatgacgatgacaagtagctcgaggacggggtgaactacgcctgaggatccgatctttttccctctgccaaaaattatggggacatcatgaagccccttgagcatctgacttctggctaataaaggaaatttattttcattgcaatagtgtgttggaattttttgtgtctctcactcggcctaggtagataagtagcatggcgggttaatcattaactacaaggaacccctagtgatggagttggccactccctctctgcgcgctcgctcgctcactgaggccgggcgaccaaaggtcgcccgacgcccgggctttgcccgggcggcctcagtgagcgagcgagcgcgcagccttaattaacctaattcactggccgtcgttttacaacgtcgtgactgggaaaaccctggcgttacccaacttaatcgccttgcagcacatccccctttcgccagctggcgtaatagcgaagaggcccgcaccgatcgcccttcccaacagttgcgcagcctgaatggcgaatgggacgcgccctgtagcggcgcattaagcgcggcgggtgtggtggttacgcgcagcgtgaccgctacacttgccagcgccctagcgcccgctcctttcgctttcttcccttcctttctcgccacgttcgccggctttccccgtcaagctctaaatcgggggctccctttagggttccgatttagtgctttacggcacctcgaccccaaaaaacttgattagggtgatggttcacgtagtgggccatcgccctgatagacggtttttcgccctttgacgttggagtccacgttctttaatagtggactcttgttccaaactggaacaacactcaaccctatctcggtctattcttttgatttataagggattttgccgatttcggcctattggttaaaaaatgagctgatttaacaaaaatttaacgcgaattttaacaaaatattaacgcttacaatttaggtggcacttttcggggaaatgtgcgcggaacccctatttgtttatttttctaaatacattcaaatatgtatccgctcatgagacaataaccctgataaatgcttcaataatattgaaaaaggaagagtatgagtattcaacatttccgtgtcgcccttattcccttttttgcggcattttgccttcctgtttttgctcacccagaaacgctggtgaaagtaaaagatgctgaagatcagttgggtgcacgagtgggttacatcgaactggatctcaacagcggtaagatccttgagagttttcgccccgaagaacgttttccaatgatgagcacttttaaagttctgctatgtggcgcggtattatcccgtattgacgccgggcaagagcaactcggtcgccgcatacactattctcagaatgacttggttgagtactcaccagtcacagaaaagcatcttacggatggcatgacagtaagagaattatgcagtgctgccataaccatgagtgataacactgcggccaacttacttctgacaacgatcggaggaccgaaggagctaaccgcttttttgcacaacatgggggatcatgtaactcgccttgatcgttgggaaccggagctgaatgaagccataccaaacgacgagcgtgacaccacgatgcctgtagcaatggcaacaacgttgcgcaaactattaactggcgaactacttactctagcttcccggcaacaattaatagactggatggaggcggataaagttgcaggaccacttctgcgctcggcccttccggctggctggtttattgctgataaatctggagccggtgagcgtgggtctcgcggtatcattgcagcactggggccagatggtaagccctcccgtatcgtagttatctacacgacggggagtcaggcaactatggatgaacgaaatagacagatcgctgagataggtgcctcactgattaagcattggtaactgtcagaccaagtttactcatatatactttagattgatttaaaacttcatttttaatttaaaaggatctaggtgaagatcctttttgataatctcatgaccaaaatcccttaacgtgagttttcgttccactgagcgtcagaccccgtagaaaagatcaaaggatcttcttgagatcctttttttctgcgcgtaatctgctgcttgcaaacaaaaaaaccaccgctaccagcggtggtttgtttgccggatcaagagctaccaactctttttccgaaggtaactggcttcagcagagcgcagataccaaatactgttcttctagtgtagccgtagttaggccaccacttcaagaactctgtagcaccgcctacatacctcgctctgctaatcctgttaccagtggctgctgccagtggcgataagtcgtgtcttaccgggttggactcaagacgatagttaccggataaggcgcagcggtcgggctgaacggggggttcgtgcacacagcccagcttggagcgaacgacctacaccgaactgagatacctacagcgtgagctatgagaaagcgccacgcttcccgaagggagaaaggcggacaggtatccggtaagcggcagggtcggaacaggagagcgcacgagggagcttccagggggaaacgcctggtatctttatagtcctgtcgggtttcgccacctctgacttgagcgtcgatttttgtgatgctcgtcaggggggcggagcctatggaaaaacgccagcaacgcggcctttttacggttcctggccttttgctggccttttgctcacatgttctttcctgcgttatcccctgattctgtggataaccgtattaccgcctttgagtgagctgataccgctcgccgcagccgaacgaccgagcgcagcgagtcagtgagcgaggaagcggaagagcgcccaatacgcaaaccgcctctccccgcgcgttggccgattcattaatgcagctggcacgacaggtttcccgactggaaagcgggcagtgagcgcaacgcaattaatgtgagttagctcactcattaggcaccccaggctttacactttatgcttccggctcgtatgttgtgtggaattgtgagcggataacaatttcacacaggaaacagctatgaccatgattacgccagatttaattaaggccttaattagg

SEQ ID NO: 635 - DNA, 4886 bp, Artificial Sequence
  Description of Artificial Sequence: Synthetic polynucleotide
ctgcgcgctcgctcgctcactgaggccgcccgggcaaagcccgggcgtcgggcgacctttggtcgcccggcctcagtgagcgagcgagcgcgcagagagggagtgtagccatgctctaggaagatcaattcaattcacgcgtcgacattgattattgactagttattaatagtaatcaattacggggtcattagttcatagcccatatatggagttccgcgttacataacttacggtaaatggcccgcctggctgaccgcccaacgacccccgcccattgacgtcaataatgacgtatgttcccatagtaacgccaatagggactttccattgacgtcaatgggtggagtatttacggtaaactgcccacttggcagtacatcaagtgtatcatatgccaagtacgccccctattgacgtcaatgacggtaaatggcccgcctggcattatgcccagtacatgaccttatgggactttcctacttggcagtacatctacgtattagtcatcgctattaccatgtcgaggccacgttctgcttcactctccccatctcccccccctccccacccccaattttgtatttatttattttttaattattttgtgcagcgatgggggcggggggggggggcgcgcgccaggcggggcggggcggggcgaggggcggggcggggcgaggcggagaggtgcggcggcagccaatcagagcggcgcgctccgaaagtttccttttatggcgaggcggcggcggcggcggccctataaaaagcgaagcgcgcggcgggcgggagcaagcttgaactgaaaaaccagaaagttaactggtaagtttagtctttttgtcttttatttcaggtcccggatccggtggtggtgcaaatcaaagaactgctcctcagtggatgttgcctttacttctaggcctgtacggaagtgttacttctgctctaaaagctgcggaattgtacccgcggccgatccaccggtatgtggactctcgggcgccgcgcagtagccggcctcctggcgtcacccagcccagcccaggcccagaccctcacccgggtcccgcggccggcagagttggccccactctgcggccgccgtggcctgcgcaccgacatcgatgcgacctgcacgccccgccgcgcaagttcgaaccaacgtggcctcaaccagatttggaatgtcaaaaagcagagtgtctatttgatgaatttgaggaaatctggaactttgggccacccaggctctctagatgagaccacctatgaaagactagcagaggaaacgctggactctttagcagagttttttgaagaccttgcagacaagccatacacgtttgaggactatgatgtctcctttgggagtggtgtcttaactgtcaaactgggtggagatctaggaacctatgtgatcaacaagcagacgccaaacaagcaaatctggctatcttctccatccagtggacctaagcgttatgactggactgggaaaaactgggtgtactcccacgacggcgtgtccctccatgagctgctggccgcagagctcactaaagccttaaaaaccaaactggacttgtcttccttggcctattccggaaaagatgctggatccgaacaaaaactcatctcagaagaggatctgggatccgactacaaagaccatgacggtgattataaagatcatgacatcgactacaaggatgacgatgacaagtagctcgaggacggggtgaactacgcctgaggatccgatctttttccctctgccaaaaattatggggacatcatgaagccccttgagcatctgacttctggctaataaaggaaatttattttcattgcaatagtgtgttggaattttttgtgtctctcactcggcctaggtagataagtagcatggcgggttaatcattaactacaaggaacccctagtgatggagttggccactccctctctgcgcgctcgctcgctcactgaggccgggcgaccaaaggtcgcccgacgcccgggctttgcccgggcggcctcagtgagcgagcgagcgcgcagccttaattaacctaattcactggccgtcgttttacaacgtcgtgactgggaaaaccctggcgttacccaacttaatcgccttgcagcacatccccctttcgccagctggcgtaatagcgaagaggcccgcaccgatcgcccttcccaacagttgcgcagcctgaatggcgaatgggacgcgccctgtagcggcgcattaagcgcggcgggtgtggtggttacgcgcagcgtgaccgctacacttgccagcgccctagcgcccgctcctttcgctttcttcccttcctttctcgccacgttcgccggctttccccgtcaagctctaaatcgggggctccctttagggttccgatttagtgctttacggcacctcgaccccaaaaaacttgattagggtgatggttcacgtagtgggccatcgccctgatagacggtttttcgccctttgacgttggagtccacgttctttaatagtggactcttgttccaaactggaacaacactcaaccctatctcggtctattcttttgatttataagggattttgccgatttcggcctattggttaaaaaatgagctgatttaacaaaaatttaacgcgaattttaacaaaatattaacgcttacaatttaggtggcacttttcggggaaatgtgcgcggaacccctatttgtttatttttctaaatacattcaaatatgtatccgctcatgagacaataaccctgataaatgcttcaataatattgaaaaaggaagagtatgagtattcaacatttccgtgtcgcccttattcccttttttgcggcattttgccttcctgtttttgctcacccagaaacgctggtgaaagtaaaagatgctgaagatcagttgggtgcacgagtgggttacatcgaactggatctcaacagcggtaagatccttgagagttttcgccccgaagaacgttttccaatgatgagcacttttaaagttctgctatgtggcgcggtattatcccgtattgacgccgggcaagagcaactcggtcgccgcatacactattctcagaatgacttggttgagtactcaccagtcacagaaaagcatcttacggatggcatgacagtaagagaattatgcagtgctgccataaccatgagtgataacactgcggccaacttacttctgacaacgatcggaggaccgaaggagctaaccgcttttttgcacaacatgggggatcatgtaactcgccttgatcgttgggaaccggagctgaatgaagccataccaaacgacgagcgtgacaccacgatgcctgtagcaatggcaacaacgttgcgcaaactattaactggcgaactacttactctagcttcccggcaacaattaatagactggatggaggcggataaagttgcaggaccacttctgcgctcggcccttccggctggctggtttattgctgataaatctggagccggtgagcgtgggtctcgcggtatcattgcagcactggggccagatggtaagccctcccgtatcgtagttatctacacgacggggagtcaggcaactatggatgaacgaaatagacagatcgctgagataggtgcctcactgattaagcattggtaactgtcagaccaagtttactcatatatactttagattgatttaaaacttcatttttaatttaaaaggatctaggtgaagatcctttttgataatctcatgaccaaaatcccttaacgtgagttttcgttccactgagcgtcagaccccgtagaaaagatcaaaggatcttcttgagatcctttttttctgcgcgtaatctgctgcttgcaaacaaaaaaaccaccgctaccagcggtggtttgtttgccggatcaagagctaccaactctttttccgaaggtaactggcttcagcagagcgcagataccaaatactgttcttctagtgtagccgtagttaggccaccacttcaagaactctgtagcaccgcctacatacctcgctctgctaatcctgttaccagtggctgctgccagtggcgataagtcgtgtcttaccgggttggactcaagacgatagttaccggataaggcgcagcggtcgggctgaacggggggttcgtgcacacagcccagcttggagcgaacgacctacaccgaactgagatacctacagcgtgagctatgagaaagcgccacgcttcccgaagggagaaaggcggacaggtatccggtaagcggcagggtcggaacaggagagcgcacgagggagcttccagggggaaacgcctggtatctttatagtcctgtcgggtttcgccacctctgacttgagcgtcgatttttgtgatgctcgtcaggggggcggagcctatggaaaaacgccagcaacgcggcctttttacggttcctggccttttgctggccttttgctcacatgttctttcctgcgttatcccctgattctgtggataaccgtattaccgcctttgagtgagctgataccgctcgccgcagccgaacgaccgagcgcagcgagtcagtgagcgaggaagcggaagagcgcccaatacgcaaaccgcctctccccgcgcgttggccgattcattaatgcagctggcacgacaggtttcccgactggaaagcgggcagtgagcgcaacgcaattaatgtgagttagctcactcattaggcaccccaggctttacactttatgcttccggctcgtatgttgtgtggaattgtgagcggataacaatttcacacaggaaacagctatgaccatgattacgccagatttaattaaggccttaattagg

SEQ ID NO: 636 - DNA, 4808 bp, Artificial Sequence
  Description of Artificial Sequence: Synthetic polynucleotide
ctgcgcgctcgctcgctcactgaggccgcccgggcaaagcccgggcgtcgggcgacctttggtcgcccggcctcagtgagcgagcgagcgcgcagagagggagtgtagccatgctctaggaagatcaattcaattcacgcgtcgacattgattattgactagttattaatagtaatcaattacggggtcattagttcatagcccatatatggagttccgcgttacataacttacggtaaatggcccgcctggctgaccgcccaacgacccccgcccattgacgtcaataatgacgtatgttcccatagtaacgccaatagggactttccattgacgtcaatgggtggagtatttacggtaaactgcccacttggcagtacatcaagtgtatcatatgccaagtacgccccctattgacgtcaatgacggtaaatggcccgcctggcattatgcccagtacatgaccttatgggactttcctacttggcagtacatctacgtattagtcatcgctattaccatgtcgaggccacgttctgcttcactctccccatctcccccccctccccacccccaattttgtatttatttattttttaattattttgtgcagcgatgggggcggggggggggggcgcgcgccaggcggggcggggcggggcgaggggcggggcggggcgaggcggagaggtgcggcggcagccaatcagagcggcgcgctccgaaagtttccttttatggcgaggcggcggcggcggcggccctataaaaagcgaagcgcgcggcgggcgggagcaagcttgaactgaaaaaccagaaagttaactggtaagtttagtctttttgtcttttatttcaggtcccggatccggtggtggtgcaaatcaaagaactgctcctcagtggatgttgcctttacttctaggcctgtacggaagtgttacttctgctctaaaagctgcggaattgtacccgcggccgatccaccggtatgtggactctcgggcgccgcgcagtagccggcctcctggcgtcacccagcccagcccaggcccagaccctcacccgggtcccgcggccggcagagttggccccactctgcggccgccgtggcctgcgcaccgacatcgatgcgacctgcacgccccgccgcgcaagttcgaaccaacgtggcctcaaccagatttggaatgtcaaaaagcagagtgtctatttgatgaatttgaggaaatctggaactttgggccacccaggctctctagatgagaccacctatgaaagactagcagaggaaacgctggactctttagcagagttttttgaagaccttgcagacaagccatacacgtttgaggactatgatgtctcctttgggagtggtgtcttaactgtcaaactgggtggagatctaggaacctatgtgatcaacaagcagacgccaaacaagcaaatctggctatcttctccatccagtggacctaagcgttatgactggactgggaaaaactgggtgtactcccacgacggcgtgtccctccatgagctgctggccgcagagctcactaaagccttaaaaaccaaactggacttgtcttccttggcctattccggaaaagatgctgaacaaaaactcatctcagaagaggatctgtagctcgaggacggggtgaactacgcctgaggatccgatctttttccctctgccaaaaattatggggacatcatgaagccccttgagcatctgacttctggctaataaaggaaatttattttcattgcaatagtgtgttggaattttttgtgtctctcactcggcctaggtagataagtagcatggcgggttaatcattaactacaaggaacccctagtgatggagttggccactccctctctgcgcgctcgctcgctcactgaggccgggcgaccaaaggtcgcccgacgcccgggctttgcccgggcggcctcagtgagcgagcgagcgcgcagccttaattaacctaattcactggccgtcgttttacaacgtcgtgactgggaaaaccctggcgttacccaacttaatcgccttgcagcacatccccctttcgccagctggcgtaatagcgaagaggcccgcaccgatcgcccttcccaacagttgcgcagcctgaatggcgaatgggacgcgccctgtagcggcgcattaagcgcggcgggtgtggtggttacgcgcagcgtgaccgctacacttgccagcgccctagcgcccgctcctttcgctttcttcccttcctttctcgccacgttcgccggctttccccgtcaagctctaaatcgggggctccctttagggttccgatttagtgctttacggcacctcgaccccaaaaaacttgattagggtgatggttcacgtagtgggccatcgccctgatagacggtttttcgccctttgacgttggagtccacgttctttaatagtggactcttgttccaaactggaacaacactcaaccctatctcggtctattcttttgatttataagggattttgccgatttcggcctattggttaaaaaatgagctgatttaacaaaaatttaacgcgaattttaacaaaatattaacgcttacaatttaggtggcacttttcggggaaatgtgcgcggaacccctatttgtttatttttctaaatacattcaaatatgtatccgctcatgagacaataaccctgataaatgcttcaataatattgaaaaaggaagagtatgagtattcaacatttccgtgtcgcccttattcccttttttgcggcattttgccttcctgtttttgctcacccagaaacgctggtgaaagtaaaagatgctgaagatcagttgggtgcacgagtgggttacatcgaactggatctcaacagcggtaagatccttgagagttttcgccccgaagaacgttttccaatgatgagcacttttaaagttctgctatgtggcgcggtattatcccgtattgacgccgggcaagagcaactcggtcgccgcatacactattctcagaatgacttggttgagtactcaccagtcacagaaaagcatcttacggatggcatgacagtaagagaattatgcagtgctgccataaccatgagtgataacactgcggccaacttacttctgacaacgatcggaggaccgaaggagctaaccgcttttttgcacaacatgggggatcatgtaactcgccttgatcgttgggaaccggagctgaatgaagccataccaaacgacgagcgtgacaccacgatgcctgtagcaatggcaacaacgttgcgcaaactattaactggcgaactacttactctagcttcccggcaacaattaatagactggatggaggcggataaagttgcaggaccacttctgcgctcggcccttccggctggctggtttattgctgataaatctggagccggtgagcgtgggtctcgcggtatcattgcagcactggggccagatggtaagccctcccgtatcgtagttatctacacgacggggagtcaggcaactatggatgaacgaaatagacagatcgctgagataggtgcctcactgattaagcattggtaactgtcagaccaagtttactcatatatactttagattgatttaaaacttcatttttaatttaaaaggatctaggtgaagatcctttttgataatctcatgaccaaaatcccttaacgtgagttttcgttccactgagcgtcagaccccgtagaaaagatcaaaggatcttcttgagatcctttttttctgcgcgtaatctgctgcttgcaaacaaaaaaaccaccgctaccagcggtggtttgtttgccggatcaagagctaccaactctttttccgaaggtaactggcttcagcagagcgcagataccaaatactgttcttctagtgtagccgtagttaggccaccacttcaagaactctgtagcaccgcctacatacctcgctctgctaatcctgttaccagtggctgctgccagtggcgataagtcgtgtcttaccgggttggactcaagacgatagttaccggataaggcgcagcggtcgggctgaacggggggttcgtgcacacagcccagcttggagcgaacgacctacaccgaactgagatacctacagcgtgagctatgagaaagcgccacgcttcccgaagggagaaaggcggacaggtatccggtaagcggcagggtcggaacaggagagcgcacgagggagcttccagggggaaacgcctggtatctttatagtcctgtcgggtttcgccacctctgacttgagcgtcgatttttgtgatgctcgtcaggggggcggagcctatggaaaaacgccagcaacgcggcctttttacggttcctggccttttgctggccttttgctcacatgttctttcctgcgttatcccctgattctgtggataaccgtattaccgcctttgagtgagctgataccgctcgccgcagccgaacgaccgagcgcagcgagtcagtgagcgaggaagcggaagagcgcccaatacgcaaaccgcctctccccgcgcgttggccgattcattaatgcagctggcacgacaggtttcccgactggaaagcgggcagtgagcgcaacgcaattaatgtgagttagctcactcattaggcaccccaggctttacactttatgcttccggctcgtatgttgtgtggaattgtgagcggataacaatttcacacaggaaacagctatgaccatgattacgccagatttaattaaggccttaattagg

SEQ ID NO: 637 - DNA, 4886 bp, Artificial Sequence
  Description of Artificial Sequence: Synthetic polynucleotide
ctgcgcgctcgctcgctcactgaggccgcccgggcaaagcccgggcgtcgggcgacctttggtcgcccggcctcagtgagcgagcgagcgcgcagagagggagtgtagccatgctctaggaagatcaattcaattcacgcgtcgacattgattattgactagttattaatagtaatcaattacggggtcattagttcatagcccatatatggagttccgcgttacataacttacggtaaatggcccgcctggctgaccgcccaacgacccccgcccattgacgtcaataatgacgtatgttcccatagtaacgccaatagggactttccattgacgtcaatgggtggagtatttacggtaaactgcccacttggcagtacatcaagtgtatcatatgccaagtacgccccctattgacgtcaatgacggtaaatggcccgcctggcattatgcccagtacatgaccttatgggactttcctacttggcagtacatctacgtattagtcatcgctattaccatgtcgaggccacgttctgcttcactctccccatctcccccccctccccacccccaattttgtatttatttattttttaattattttgtgcagcgatgggggcggggggggggggcgcgcgccaggcggggcggggcggggcgaggggcggggcggggcgaggcggagaggtgcggcggcagccaatcagagcggcgcgctccgaaagtttccttttatggcgaggcggcggcggcggcggccctataaaaagcgaagcgcgcggcgggcgggagcaagcttgaactgaaaaaccagaaagttaactggtaagtttagtctttttgtcttttatttcaggtcccggatccggtggtggtgcaaatcaaagaactgctcctcagtggatgttgcctttacttctaggcctgtacggaagtgttacttctgctctaaaagctgcggaattgtacccgcggccgatccaccggtatgtggactctcgggcgccgcgcagtagccggcctcctggcgtcacccagcccagcccaggcccagaccctcacccgggtcccgcggccggcagagttggccccactctgcggccgccgtggcctgcgcaccgacatcgatgcgacctgcacgccccgccgcgcaagttcgaaccaacgtggcctcaaccagatttggaatgtcaaaaagcagagtgtctatttgatgaatttgaggaaatctggaactttgggccacccaggctctctagatgagaccacctatgaaagactagcagaggaaacgctggactctttagcagagttttttgaagaccttgcagacaagccatacacgtttgaggactatgatgtctcctttgggagtggtgtcttaactgtcaaactgggtggagatctaggaacctatgtgatcaacaagcagacgccaaacaagcaaatctggctatcttctccatccagtggacctaagcgttatgactggactgggaaaaactgggtgtactcccacgacggcgtgtccctccatgagctgctggccgcagagctcactaaagccttaaaaaccaaactggacttgtcttccttggcctattccggaaaagatgctggatccgactacaaagaccatgacggtgattataaagatcatgacatcgactacaaggatgacgatgacaagggatccgaacaaaaactcatctcagaagaggatctgtagctcgaggacggggtgaactacgcctgaggatccgatctttttccctctgccaaaaattatggggacatcatgaagccccttgagcatctgacttctggctaataaaggaaatttattttcattgcaatagtgtgttggaattttttgtgtctctcactcggcctaggtagataagtagcatggcgggttaatcattaactacaaggaacccctagtgatggagttggccactccctctctgcgcgctcgctcgctcactgaggccgggcgaccaaaggtcgcccgacgcccgggctttgcccgggcggcctcagtgagcgagcgagcgcgcagccttaattaacctaattcactggccgtcgttttacaacgtcgtgactgggaaaaccctggcgttacccaacttaatcgccttgcagcacatccccctttcgccagctggcgtaatagcgaagaggcccgcaccgatcgcccttcccaacagttgcgcagcctgaatggcgaatgggacgcgccctgtagcggcgcattaagcgcggcgggtgtggtggttacgcgcagcgtgaccgctacacttgccagcgccctagcgcccgctcctttcgctttcttcccttcctttctcgccacgttcgccggctttccccgtcaagctctaaatcgggggctccctttagggttccgatttagtgctttacggcacctcgaccccaaaaaacttgattagggtgatggttcacgtagtgggccatcgccctgatagacggtttttcgccctttgacgttggagtccacgttctttaatagtggactcttgttccaaactggaacaacactcaaccctatctcggtctattcttttgatttataagggattttgccgatttcggcctattggttaaaaaatgagctgatttaacaaaaatttaacgcgaattttaacaaaatattaacgcttacaatttaggtggcacttttcggggaaatgtgcgcggaacccctatttgtttatttttctaaatacattcaaatatgtatccgctcatgagacaataaccctgataaatgcttcaataatattgaaaaaggaagagtatgagtattcaacatttccgtgtcgcccttattcccttttttgcggcattttgccttcctgtttttgctcacccagaaacgctggtgaaagtaaaagatgctgaagatcagttgggtgcacgagtgggttacatcgaactggatctcaacagcggtaagatccttgagagttttcgccccgaagaacgttttccaatgatgagcacttttaaagttctgctatgtggcgcggtattatcccgtattgacgccgggcaagagcaactcggtcgccgcatacactattctcagaatgacttggttgagtactcaccagtcacagaaaagcatcttacggatggcatgacagtaagagaattatgcagtgctgccataaccatgagtgataacactgcggccaacttacttctgacaacgatcggaggaccgaaggagctaaccgcttttttgcacaacatgggggatcatgtaactcgccttgatcgttgggaaccggagctgaatgaagccataccaaacgacgagcgtgacaccacgatgcctgtagcaatggcaacaacgttgcgcaaactattaactggcgaactacttactctagcttcccggcaacaattaatagactggatggaggcggataaagttgcaggaccacttctgcgctcggcccttccggctggctggtttattgctgataaatctggagccggtgagcgtgggtctcgcggtatcattgcagcactggggccagatggtaagccctcccgtatcgtagttatctacacgacggggagtcaggcaactatggatgaacgaaatagacagatcgctgagataggtgcctcactgattaagcattggtaactgtcagaccaagtttactcatatatactttagattgatttaaaacttcatttttaatttaaaaggatctaggtgaagatcctttttgataatctcatgaccaaaatcccttaacgtgagttttcgttccactgagcgtcagaccccgtagaaaagatcaaaggatcttcttgagatcctttttttctgcgcgtaatctgctgcttgcaaacaaaaaaaccaccgctaccagcggtggtttgtttgccggatcaagagctaccaactctttttccgaaggtaactggcttcagcagagcgcagataccaaatactgttcttctagtgtagccgtagttaggccaccacttcaagaactctgtagcaccgcctacatacctcgctctgctaatcctgttaccagtggctgctgccagtggcgataagtcgtgtcttaccgggttggactcaagacgatagttaccggataaggcgcagcggtcgggctgaacggggggttcgtgcacacagcccagcttggagcgaacgacctacaccgaactgagatacctacagcgtgagctatgagaaagcgccacgcttcccgaagggagaaaggcggacaggtatccggtaagcggcagggtcggaacaggagagcgcacgagggagcttccagggggaaacgcctggtatctttatagtcctgtcgggtttcgccacctctgacttgagcgtcgatttttgtgatgctcgtcaggggggcggagcctatggaaaaacgccagcaacgcggcctttttacggttcctggccttttgctggccttttgctcacatgttctttcctgcgttatcccctgattctgtggataaccgtattaccgcctttgagtgagctgataccgctcgccgcagccgaacgaccgagcgcagcgagtcagtgagcgaggaagcggaagagcgcccaatacgcaaaccgcctctccccgcgcgttggccgattcattaatgcagctggcacgacaggtttcccgactggaaagcgggcagtgagcgcaacgcaattaatgtgagttagctcactcattaggcaccccaggctttacactttatgcttccggctcgtatgttgtgtggaattgtgagcggataacaatttcacacaggaaacagctatgaccatgattacgccagatttaattaaggccttaattagg

SEQ ID NO: 638 - DNA, 4778 bp, Artificial Sequence
  Description of Artificial Sequence: Synthetic polynucleotide
ctgcgcgctcgctcgctcactgaggccgcccgggcaaagcccgggcgtcgggcgacctttggtcgcccggcctcagtgagcgagcgagcgcgcagagagggagtgtagccatgctctaggaagatcaattcaattcacgcgtcgacattgattattgactagttattaatagtaatcaattacggggtcattagttcatagcccatatatggagttccgcgttacataacttacggtaaatggcccgcctggctgaccgcccaacgacccccgcccattgacgtcaataatgacgtatgttcccatagtaacgccaatagggactttccattgacgtcaatgggtggagtatttacggtaaactgcccacttggcagtacatcaagtgtatcatatgccaagtacgccccctattgacgtcaatgacggtaaatggcccgcctggcattatgcccagtacatgaccttatgggactttcctacttggcagtacatctacgtattagtcatcgctattaccatgtcgaggccacgttctgcttcactctccccatctcccccccctccccacccccaattttgtatttatttattttttaattattttgtgcagcgatgggggcggggggggggggcgcgcgccaggcggggcggggcggggcgaggggcggggcggggcgaggcggagaggtgcggcggcagccaatcagagcggcgcgctccgaaagtttccttttatggcgaggcggcggcggcggcggccctataaaaagcgaagcgcgcggcgggcgggagcaagcttgaactgaaaaaccagaaagttaactggtaagtttagtctttttgtcttttatttcaggtcccggatccggtggtggtgcaaatcaaagaactgctcctcagtggatgttgcctttacttctaggcctgtacggaagtgttacttctgctctaaaagctgcggaattgtacccgcggccgatccaccggtatgtggacactcgggcgacgcgccgtggctgggctgcttgcttccccaagtcccgcacaggcgcaaaccctcacaagggtcccacggccagctgaattggccccgctgtgcggtcggaggggcctgcgaacagatatagacgcaacgtgcacccccagaagagcaagcagcaaccagagaggcctcaatcagatttggaacgtcaagaaacagagtgtctatctgatgaacctccgcaaatcagggacccttggtcatccgggatctcttgatgaaacgacctatgaacggctggctgaggagacgcttgactccctggcagagttcttcgaggatctggctgataagccatacacgttcgaggactatgatgtttcttttggttctggcgtcctgacggtgaaactcggaggggatctgggcacttacgttatcaacaaacagactcccaataaacagatttggttgtctagtcctagcagtggcccaaaacgctatgactggacgggcaagaactgggtgtactcccacgatggagttagcctgcacgaacttctggccgctgagcttactaaagcgctgaagactaagctggatctctccagcctcgcatacagcggcaaagacgcctagctcgaggacggggtgaactacgcctgaggatccgatctttttccctctgccaaaaattatggggacatcatgaagccccttgagcatctgacttctggctaataaaggaaatttattttcattgcaatagtgtgttggaattttttgtgtctctcactcggcctaggtagataagtagcatggcgggttaatcattaactacaaggaacccctagtgatggagttggccactccctctctgcgcgctcgctcgctcactgaggccgggcgaccaaaggtcgcccgacgcccgggctttgcccgggcggcctcagtgagcgagcgagcgcgcagccttaattaacctaattcactggccgtcgttttacaacgtcgtgactgggaaaaccctggcgttacccaacttaatcgccttgcagcacatccccctttcgccagctggcgtaatagcgaagaggcccgcaccgatcgcccttcccaacagttgcgcagcctgaatggcgaatgggacgcgccctgtagcggcgcattaagcgcggcgggtgtggtggttacgcgcagcgtgaccgctacacttgccagcgccctagcgcccgctcctttcgctttcttcccttcctttctcgccacgttcgccggctttccccgtcaagctctaaatcgggggctccctttagggttccgatttagtgctttacggcacctcgaccccaaaaaacttgattagggtgatggttcacgtagtgggccatcgccctgatagacggtttttcgccctttgacgttggagtccacgttctttaatagtggactcttgttccaaactggaacaacactcaaccctatctcggtctattcttttgatttataagggattttgccgatttcggcctattggttaaaaaatgagctgatttaacaaaaatttaacgcgaattttaacaaaatattaacgcttacaatttaggtggcacttttcggggaaatgtgcgcggaacccctatttgtttatttttctaaatacattcaaatatgtatccgctcatgagacaataaccctgataaatgcttcaataatattgaaaaaggaagagtatgagtattcaacatttccgtgtcgcccttattcccttttttgcggcattttgccttcctgtttttgctcacccagaaacgctggtgaaagtaaaagatgctgaagatcagttgggtgcacgagtgggttacatcgaactggatctcaacagcggtaagatccttgagagttttcgccccgaagaacgttttccaatgatgagcacttttaaagttctgctatgtggcgcggtattatcccgtattgacgccgggcaagagcaactcggtcgccgcatacactattctcagaatgacttggttgagtactcaccagtcacagaaaagcatcttacggatggcatgacagtaagagaattatgcagtgctgccataaccatgagtgataacactgcggccaacttacttctgacaacgatcggaggaccgaaggagctaaccgcttttttgcacaacatgggggatcatgtaactcgccttgatcgttgggaaccggagctgaatgaagccataccaaacgacgagcgtgacaccacgatgcctgtagcaatggcaacaacgttgcgcaaactattaactggcgaactacttactctagcttcccggcaacaattaatagactggatggaggcggataaagttgcaggaccacttctgcgctcggcccttccggctggctggtttattgctgataaatctggagccggtgagcgtgggtctcgcggtatcattgcagcactggggccagatggtaagccctcccgtatcgtagttatctacacgacggggagtcaggcaactatggatgaacgaaatagacagatcgctgagataggtgcctcactgattaagcattggtaactgtcagaccaagtttactcatatatactttagattgatttaaaacttcatttttaatttaaaaggatctaggtgaagatcctttttgataatctcatgaccaaaatcccttaacgtgagttttcgttccactgagcgtcagaccccgtagaaaagatcaaaggatcttcttgagatcctttttttctgcgcgtaatctgctgcttgcaaacaaaaaaaccaccgctaccagcggtggtttgtttgccggatcaagagctaccaactctttttccgaaggtaactggcttcagcagagcgcagataccaaatactgttcttctagtgtagccgtagttaggccaccacttcaagaactctgtagcaccgcctacatacctcgctctgctaatcctgttaccagtggctgctgccagtggcgataagtcgtgtcttaccgggttggactcaagacgatagttaccggataaggcgcagcggtcgggctgaacggggggttcgtgcacacagcccagcttggagcgaacgacctacaccgaactgagatacctacagcgtgagctatgagaaagcgccacgcttcccgaagggagaaaggcggacaggtatccggtaagcggcagggtcggaacaggagagcgcacgagggagcttccagggggaaacgcctggtatctttatagtcctgtcgggtttcgccacctctgacttgagcgtcgatttttgtgatgctcgtcaggggggcggagcctatggaaaaacgccagcaacgcggcctttttacggttcctggccttttgctggccttttgctcacatgttctttcctgcgttatcccctgattctgtggataaccgtattaccgcctttgagtgagctgataccgctcgccgcagccgaacgaccgagcgcagcgagtcagtgagcgaggaagcggaagagcgcccaatacgcaaaccgcctctccccgcgcgttggccgattcattaatgcagctggcacgacaggtttcccgactggaaagcgggcagtgagcgcaacgcaattaatgtgagttagctcactcattaggcaccccaggctttacactttatgcttccggctcgtatgttgtgtggaattgtgagcggataacaatttcacacaggaaacagctatgaccatgattacgccagatttaattaaggccttaattagg

SEQ ID NO: 639 - DNA, 4778 bp, Artificial Sequence
  Description of Artificial Sequence: Synthetic polynucleotide
ctgcgcgctcgctcgctcactgaggccgcccgggcaaagcccgggcgtcgggcgacctttggtcgcccggcctcagtgagcgagcgagcgcgcagagagggagtgtagccatgctctaggaagatcaattcaattcacgcgtcgacattgattattgactagttattaatagtaatcaattacggggtcattagttcatagcccatatatggagttccgcgttacataacttacggtaaatggcccgcctggctgaccgcccaacgacccccgcccattgacgtcaataatgacgtatgttcccatagtaacgccaatagggactttccattgacgtcaatgggtggagtatttacggtaaactgcccacttggcagtacatcaagtgtatcatatgccaagtacgccccctattgacgtcaatgacggtaaatggcccgcctggcattatgcccagtacatgaccttatgggactttcctacttggcagtacatctacgtattagtcatcgctattaccatgtcgaggccacgttctgcttcactctccccatctcccccccctccccacccccaattttgtatttatttattttttaattattttgtgcagcgatgggggcggggggggggggcgcgcgccaggcggggcggggcggggcgaggggcggggcggggcgaggcggagaggtgcggcggcagccaatcagagcggcgcgctccgaaagtttccttttatggcgaggcggcggcggcggcggccctataaaaagcgaagcgcgcggcgggcgggagcaagcttgaactgaaaaaccagaaagttaactggtaagtttagtctttttgtcttttatttcaggtcccggatccggtggtggtgcaaatcaaagaactgctcctcagtggatgttgcctttacttctaggcctgtacggaagtgttacttctgctctaaaagctgcggaattgtacccgcggccgatccaccggtatgtggactctgggtcgacgcgccgtagccggtctcttggcctccccatcccctgcgcaggcacagacccttacacgagttccacggcccgctgaactggcaccactctgcggacgccggggcctgagaaccgatattgacgctacgtgcactccccgacgagcctcttctaatcagagggggctcaaccagatctggaacgtgaagaagcagtcagtctacttgatgaatctgagaaagagcgggacccttgggcaccccgggtctctcgacgagactacatacgagaggctggccgaggagactttggactctctcgccgaattcttcgaggatttggcagacaagccgtacacctttgaagactacgatgtctcattcggatcaggggtgctgacggttaaactggggggcgatctcggaacctacgtcataaacaaacagacacccaataagcagatctggttgtctagcccatcatccggtcctaaacggtacgactggaccggcaagaactgggtctactcccatgacggagtcagtcttcatgaactgcttgccgcagagctgaccaaggctcttaagacgaaactggatctctctagcctggcctactccgggaaggatgcatagctcgaggacggggtgaactacgcctgaggatccgatctttttccctctgccaaaaattatggggacatcatgaagccccttgagcatctgacttctggctaataaaggaaatttattttcattgcaatagtgtgttggaattttttgtgtctctcactcggcctaggtagataagtagcatggcgggttaatcattaactacaaggaacccctagtgatggagttggccactccctctctgcgcgctcgctcgctcactgaggccgggcgaccaaaggtcgcccgacgcccgggctttgcccgggcggcctcagtgagcgagcgagcgcgcagccttaattaacctaattcactggccgtcgttttacaacgtcgtgactgggaaaaccctggcgttacccaacttaatcgccttgcagcacatccccctttcgccagctggcgtaatagcgaagaggcccgcaccgatcgcccttcccaacagttgcgcagcctgaatggcgaatgggacgcgccctgtagcggcgcattaagcgcggcgggtgtggtggttacgcgcagcgtgaccgctacacttgccagcgccctagcgcccgctcctttcgctttcttcccttcctttctcgccacgttcgccggctttccccgtcaagctctaaatcgggggctccctttagggttccgatttagtgctttacggcacctcgaccccaaaaaacttgattagggtgatggttcacgtagtgggccatcgccctgatagacggtttttcgccctttgacgttggagtccacgttctttaatagtggactcttgttccaaactggaacaacactcaaccctatctcggtctattcttttgatttataagggattttgccgatttcggcctattggttaaaaaatgagctgatttaacaaaaatttaacgcgaattttaacaaaatattaacgcttacaatttaggtggcacttttcggggaaatgtgcgcggaacccctatttgtttatttttctaaatacattcaaatatgtatccgctcatgagacaataaccctgataaatgcttcaataatattgaaaaaggaagagtatgagtattcaacatttccgtgtcgcccttattcccttttttgcggcattttgccttcctgtttttgctcacccagaaacgctggtgaaagtaaaagatgctgaagatcagttgggtgcacgagtgggttacatcgaactggatctcaacagcggtaagatccttgagagttttcgccccgaagaacgttttccaatgatgagcacttttaaagttctgctatgtggcgcggtattatcccgtattgacgccgggcaagagcaactcggtcgccgcatacactattctcagaatgacttggttgagtactcaccagtcacagaaaagcatcttacggatggcatgacagtaagagaattatgcagtgctgccataaccatgagtgataacactgcggccaacttacttctgacaacgatcggaggaccgaaggagctaaccgcttttttgcacaacatgggggatcatgtaactcgccttgatcgttgggaaccggagctgaatgaagccataccaaacgacgagcgtgacaccacgatgcctgtagcaatggcaacaacgttgcgcaaactattaactggcgaactacttactctagcttcccggcaacaattaatagactggatggaggcggataaagttgcaggaccacttctgcgctcggcccttccggctggctggtttattgctgataaatctggagccggtgagcgtgggtctcgcggtatcattgcagcactggggccagatggtaagccctcccgtatcgtagttatctacacgacggggagtcaggcaactatggatgaacgaaatagacagatcgctgagataggtgcctcactgattaagcattggtaactgtcagaccaagtttactcatatatactttagattgatttaaaacttcatttttaatttaaaaggatctaggtgaagatcctttttgataatctcatgaccaaaatcccttaacgtgagttttcgttccactgagcgtcagaccccgtagaaaagatcaaaggatcttcttgagatcctttttttctgcgcgtaatctgctgcttgcaaacaaaaaaaccaccgctaccagcggtggtttgtttgccggatcaagagctaccaactctttttccgaaggtaactggcttcagcagagcgcagataccaaatactgttcttctagtgtagccgtagttaggccaccacttcaagaactctgtagcaccgcctacatacctcgctctgctaatcctgttaccagtggctgctgccagtggcgataagtcgtgtcttaccgggttggactcaagacgatagttaccggataaggcgcagcggtcgggctgaacggggggttcgtgcacacagcccagcttggagcgaacgacctacaccgaactgagatacctacagcgtgagctatgagaaagcgccacgcttcccgaagggagaaaggcggacaggtatccggtaagcggcagggtcggaacaggagagcgcacgagggagcttccagggggaaacgcctggtatctttatagtcctgtcgggtttcgccacctctgacttgagcgtcgatttttgtgatgctcgtcaggggggcggagcctatggaaaaacgccagcaacgcggcctttttacggttcctggccttttgctggccttttgctcacatgttctttcctgcgttatcccctgattctgtggataaccgtattaccgcctttgagtgagctgataccgctcgccgcagccgaacgaccgagcgcagcgagtcagtgagcgaggaagcggaagagcgcccaatacgcaaaccgcctctccccgcgcgttggccgattcattaatgcagctggcacgacaggtttcccgactggaaagcgggcagtgagcgcaacgcaattaatgtgagttagctcactcattaggcaccccaggctttacactttatgcttccggctcgtatgttgtgtggaattgtgagcggataacaatttcacacaggaaacagctatgaccatgattacgccagatttaattaaggccttaattagg

SEQ ID NO: 640 - DNA, 4778 bp, Artificial Sequence
  Description of Artificial Sequence: Synthetic polynucleotide
ctgcgcgctcgctcgctcactgaggccgcccgggcaaagcccgggcgtcgggcgacctttggtcgcccggcctcagtgagcgagcgagcgcgcagagagggagtgtagccatgctctaggaagatcaattcaattcacgcgtcgacattgattattgactagttattaatagtaatcaattacggggtcattagttcatagcccatatatggagttccgcgttacataacttacggtaaatggcccgcctggctgaccgcccaacgacccccgcccattgacgtcaataatgacgtatgttcccatagtaacgccaatagggactttccattgacgtcaatgggtggagtatttacggtaaactgcccacttggcagtacatcaagtgtatcatatgccaagtacgccccctattgacgtcaatgacggtaaatggcccgcctggcattatgcccagtacatgaccttatgggactttcctacttggcagtacatctacgtattagtcatcgctattaccatgtcgaggccacgttctgcttcactctccccatctcccccccctccccacccccaattttgtatttatttattttttaattattttgtgcagcgatgggggcggggggggggggcgcgcgccaggcggggcggggcggggcgaggggcggggcggggcgaggcggagaggtgcggcggcagccaatcagagcggcgcgctccgaaagtttccttttatggcgaggcggcggcggcggcggccctataaaaagcgaagcgcgcggcgggcgggagcaagcttgaactgaaaaaccagaaagttaactggtaagtttagtctttttgtcttttatttcaggtcccggatccggtggtggtgcaaatcaaagaactgctcctcagtggatgttgcctttacttctaggcctgtacggaagtgttacttctgctctaaaagctgcggaattgtacccgcggccgatccaccggtatgtggactctcgggcgacgcgccgtagccggtctcctggcttccccaagccctgcacaggcacagaccctcacacgggtcccacggccagctgaattggccccactctgcggtcgccggggcctgcgaaccgatatagacgcaacgtgcactccccgacgagcaagttccaaccagagagggctcaaccagatttggaacgtcaagaagcagagtgtctatttgatgaatctgagaaaatccgggacccttgggcaccccggatctcttgatgaaactacctatgaaaggctggccgaggagacgctggactctctggcagagttcttcgaggatctggcagacaagccatacacgtttgaggactatgatgtctcttttggatctggcgtcctgacggttaaactgggaggggatctcggaacctacgttatcaacaaacagactcccaataagcagatctggttgtctagtccatccagtggtcctaaacgctatgactggacgggcaagaactgggtgtactcccacgacggagttagccttcatgaactgctggccgcagagctgactaaagctcttaagactaaactggatctctctagcctggcctactccgggaaagatgcctagctcgaggacggggtgaactacgcctgaggatccgatctttttccctctgccaaaaattatggggacatcatgaagccccttgagcatctgacttctggctaataaaggaaatttattttcattgcaatagtgtgttggaattttttgtgtctctcactcggcctaggtagataagtagcatggcgggttaatcattaactacaaggaacccctagtgatggagttggccactccctctctgcgcgctcgctcgctcactgaggccgggcgaccaaaggtcgcccgacgcccgggctttgcccgggcggcctcagtgagcgagcgagcgcgcagccttaattaacctaattcactggccgtcgttttacaacgtcgtgactgggaaaaccctggcgttacccaacttaatcgccttgcagcacatccccctttcgccagctggcgtaatagcgaagaggcccgcaccgatcgcccttcccaacagttgcgcagcctgaatggcgaatgggacgcgccctgtagcggcgcattaagcgcggcgggtgtggtggttacgcgcagcgtgaccgctacacttgccagcgccctagcgcccgctcctttcgctttcttcccttcctttctcgccacgttcgccggctttccccgtcaagctctaaatcgggggctccctttagggttccgatttagtgctttacggcacctcgaccccaaaaaacttgattagggtgatggttcacgtagtgggccatcgccctgatagacggtttttcgccctttgacgttggagtccacgttctttaatagtggactcttgttccaaactggaacaacactcaaccctatctcggtctattcttttgatttataagggattttgccgatttcggcctattggttaaaaaatgagctgatttaacaaaaatttaacgcgaattttaacaaaatattaacgcttacaatttaggtggcacttttcggggaaatgtgcgcggaacccctatttgtttatttttctaaatacattcaaatatgtatccgctcatgagacaataaccctgataaatgcttcaataatattgaaaaaggaagagtatgagtattcaacatttccgtgtcgcccttattcccttttttgcggcattttgccttcctgtttttgctcacccagaaacgctggtgaaagtaaaagatgctgaagatcagttgggtgcacgagtgggttacatcgaactggatctcaacagcggtaagatccttgagagttttcgccccgaagaacgttttccaatgatgagcacttttaaagttctgctatgtggcgcggtattatcccgtattgacgccgggcaagagcaactcggtcgccgcatacactattctcagaatgacttggttgagtactcaccagtcacagaaaagcatcttacggatggcatgacagtaagagaattatgcagtgctgccataaccatgagtgataacactgcggccaacttacttctgacaacgatcggaggaccgaaggagctaaccgcttttttgcacaacatgggggatcatgtaactcgccttgatcgttgggaaccggagctgaatgaagccataccaaacgacgagcgtgacaccacgatgcctgtagcaatggcaacaacgttgcgcaaactattaactggcgaactacttactctagcttcccggcaacaattaatagactggatggaggcggataaagttgcaggaccacttctgcgctcggcccttccggctggctggtttattgctgataaatctggagccggtgagcgtgggtctcgcggtatcattgcagcactggggccagatggtaagccctcccgtatcgtagttatctacacgacggggagtcaggcaactatggatgaacgaaatagacagatcgctgagataggtgcctcactgattaagcattggtaactgtcagaccaagtttactcatatatactttagattgatttaaaacttcatttttaatttaaaaggatctaggtgaagatcctttttgataatctcatgaccaaaatcccttaacgtgagttttcgttccactgagcgtcagaccccgtagaaaagatcaaaggatcttcttgagatcctttttttctgcgcgtaatctgctgcttgcaaacaaaaaaaccaccgctaccagcggtggtttgtttgccggatcaagagctaccaactctttttccgaaggtaactggcttcagcagagcgcagataccaaatactgttcttctagtgtagccgtagttaggccaccacttcaagaactctgtagcaccgcctacatacctcgctctgctaatcctgttaccagtggctgctgccagtggcgataagtcgtgtcttaccgggttggactcaagacgatagttaccggataaggcgcagcggtcgggctgaacggggggttcgtgcacacagcccagcttggagcgaacgacctacaccgaactgagatacctacagcgtgagctatgagaaagcgccacgcttcccgaagggagaaaggcggacaggtatccggtaagcggcagggtcggaacaggagagcgcacgagggagcttccagggggaaacgcctggtatctttatagtcctgtcgggtttcgccacctctgacttgagcgtcgatttttgtgatgctcgtcaggggggcggagcctatggaaaaacgccagcaacgcggcctttttacggttcctggccttttgctggccttttgctcacatgttctttcctgcgttatcccctgattctgtggataaccgtattaccgcctttgagtgagctgataccgctcgccgcagccgaacgaccgagcgcagcgagtcagtgagcgaggaagcggaagagcgcccaatacgcaaaccgcctctccccgcgcgttggccgattcattaatgcagctggcacgacaggtttcccgactggaaagcgggcagtgagcgcaacgcaattaatgtgagttagctcactcattaggcaccccaggctttacactttatgcttccggctcgtatgttgtgtggaattgtgagcggataacaatttcacacaggaaacagctatgaccatgattacgccagatttaattaaggccttaattagg

SEQ ID NO: 641 - DNA, 4778 bp, Artificial Sequence
  Description of Artificial Sequence: Synthetic polynucleotide
ctgcgcgctcgctcgctcactgaggccgcccgggcaaagcccgggcgtcgggcgacctttggtcgcccggcctcagtgagcgagcgagcgcgcagagagggagtgtagccatgctctaggaagatcaattcaattcacgcgtcgacattgattattgactagttattaatagtaatcaattacggggtcattagttcatagcccatatatggagttccgcgttacataacttacggtaaatggcccgcctggctgaccgcccaacgacccccgcccattgacgtcaataatgacgtatgttcccatagtaacgccaatagggactttccattgacgtcaatgggtggagtatttacggtaaactgcccacttggcagtacatcaagtgtatcatatgccaagtacgccccctattgacgtcaatgacggtaaatggcccgcctggcattatgcccagtacatgaccttatgggactttcctacttggcagtacatctacgtattagtcatcgctattaccatgtcgaggccacgttctgcttcactctccccatctcccccccctccccacccccaattttgtatttatttattttttaattattttgtgcagcgatgggggcggggggggggggcgcgcgccaggcggggcggggcggggcgaggggcggggcggggcgaggcggagaggtgcggcggcagccaatcagagcggcgcgctccgaaagtttccttttatggcgaggcggcggcggcggcggccctataaaaagcgaagcgcgcggcgggcgggagcaagcttgaactgaaaaaccagaaagttaactggtaagtttagtctttttgtcttttatttcaggtcccggatccggtggtggtgcaaatcaaagaactgctcctcagtggatgttgcctttacttctaggcctgtacggaagtgttacttctgctctaaaagctgcggaattgtacccgcggccgatccaccggtatgtggactctggggcgacgcgccgtggccgggctcctggcatccccatcccctgcgcaggcgcaaaccctcacacgggttccacggccagctgaactggccccactgtgcggccggcggggcctgagaacagatattgacgcaacgtgcactcccagaagagccagcagcaaccagagggggttgaatcagatctggaacgtcaagaagcagtcagtgtacctgatgaatctccgaaaaagcgggacccttggtcaccccggatctctcgatgaaaccacatatgaacggctggccgaggaaacgctggactccctggccgagttcttcgaggacctggcagacaagccgtacaccttcgaagactatgatgtttcattcggaagtggcgtgctgacggtcaaactgggaggcgatctgggaacctacgttataaacaaacagactcccaataaacagatctggttgtctagtccatccagcggtcctaaacgctatgactggacgggcaagaactgggtctactcccacgacggagttagccttcacgaactgttggccgcagagctgacaaaggcgcttaagacgaaactggatctctctagcctggcctactccggcaaagatgcctagctcgaggacggggtgaactacgcctgaggatccgatctttttccctctgccaaaaattatggggacatcatgaagccccttgagcatctgacttctggctaataaaggaaatttattttcattgcaatagtgtgttggaattttttgtgtctctcactcggcctaggtagataagtagcatggcgggttaatcattaactacaaggaacccctagtgatggagttggccactccctctctgcgcgctcgctcgctcactgaggccgggcgaccaaaggtcgcccgacgcccgggctttgcccgggcggcctcagtgagcgagcgagcgcgcagccttaattaacctaattcactggccgtcgttttacaacgtcgtgactgggaaaaccctggcgttacccaacttaatcgccttgcagcacatccccctttcgccagctggcgtaatagcgaagaggcccgcaccgatcgcccttcccaacagttgcgcagcctgaatggcgaatgggacgcgccctgtagcggcgcattaagcgcggcgggtgtggtggttacgcgcagcgtgaccgctacacttgccagcgccctagcgcccgctcctttcgctttcttcccttcctttctcgccacgttcgccggctttccccgtcaagctctaaatcgggggctccctttagggttccgatttagtgctttacggcacctcgaccccaaaaaacttgattagggtgatggttcacgtagtgggccatcgccctgatagacggtttttcgccctttgacgttggagtccacgttctttaatagtggactcttgttccaaactggaacaacactcaaccctatctcggtctattcttttgatttataagggattttgccgatttcggcctattggttaaaaaatgagctgatttaacaaaaatttaacgcgaattttaacaaaatattaacgcttacaatttaggtggcacttttcggggaaatgtgcgcggaacccctatttgtttatttttctaaatacattcaaatatgtatccgctcatgagacaataaccctgataaatgcttcaataatattgaaaaaggaagagtatgagtattcaacatttccgtgtcgcccttattcccttttttgcggcattttgccttcctgtttttgctcacccagaaacgctggtgaaagtaaaagatgctgaagatcagttgggtgcacgagtgggttacatcgaactggatctcaacagcggtaagatccttgagagttttcgccccgaagaacgttttccaatgatgagcacttttaaagttctgctatgtggcgcggtattatcccgtattgacgccgggcaagagcaactcggtcgccgcatacactattctcagaatgacttggttgagtactcaccagtcacagaaaagcatcttacggatggcatgacagtaagagaattatgcagtgctgccataaccatgagtgataacactgcggccaacttacttctgacaacgatcggaggaccgaaggagctaaccgcttttttgcacaacatgggggatcatgtaactcgccttgatcgttgggaaccggagctgaatgaagccataccaaacgacgagcgtgacaccacgatgcctgtagcaatggcaacaacgttgcgcaaactattaactggcgaactacttactctagcttcccggcaacaattaatagactggatggaggcggataaagttgcaggaccacttctgcgctcggcccttccggctggctggtttattgctgataaatctggagccggtgagcgtgggtctcgcggtatcattgcagcactggggccagatggtaagccctcccgtatcgtagttatctacacgacggggagtcaggcaactatggatgaacgaaatagacagatcgctgagataggtgcctcactgattaagcattggtaactgtcagaccaagtttactcatatatactttagattgatttaaaacttcatttttaatttaaaaggatctaggtgaagatcctttttgataatctcatgaccaaaatcccttaacgtgagttttcgttccactgagcgtcagaccccgtagaaaagatcaaaggatcttcttgagatcctttttttctgcgcgtaatctgctgcttgcaaacaaaaaaaccaccgctaccagcggtggtttgtttgccggatcaagagctaccaactctttttccgaaggtaactggcttcagcagagcgcagataccaaatactgttcttctagtgtagccgtagttaggccaccacttcaagaactctgtagcaccgcctacatacctcgctctgctaatcctgttaccagtggctgctgccagtggcgataagtcgtgtcttaccgggttggactcaagacgatagttaccggataaggcgcagcggtcgggctgaacggggggttcgtgcacacagcccagcttggagcgaacgacctacaccgaactgagatacctacagcgtgagctatgagaaagcgccacgcttcccgaagggagaaaggcggacaggtatccggtaagcggcagggtcggaacaggagagcgcacgagggagcttccagggggaaacgcctggtatctttatagtcctgtcgggtttcgccacctctgacttgagcgtcgatttttgtgatgctcgtcaggggggcggagcctatggaaaaacgccagcaacgcggcctttttacggttcctggccttttgctggccttttgctcacatgttctttcctgcgttatcccctgattctgtggataaccgtattaccgcctttgagtgagctgataccgctcgccgcagccgaacgaccgagcgcagcgagtcagtgagcgaggaagcggaagagcgcccaatacgcaaaccgcctctccccgcgcgttggccgattcattaatgcagctggcacgacaggtttcccgactggaaagcgggcagtgagcgcaacgcaattaatgtgagttagctcactcattaggcaccccaggctttacactttatgcttccggctcgtatgttgtgtggaattgtgagcggataacaatttcacacaggaaacagctatgaccatgattacgccagatttaattaaggccttaattagg

SEQ ID NO: 642 - DNA, 4854 bp, Artificial Sequence
  Description of Artificial Sequence: Synthetic polynucleotide
caatttcacacaggaaacagctatgaccatgattacgccagatttaattaaggccttaattaggctgcgcgctcgctcgctcactgaggccgcccgggcaaagcccgggcgtcgggcgacctttggtcgcccggcctcagtgagcgagcgagcgcgcagagagggagtgtagccatgctctaggaagatcaattcaattcacgcgtcgacattgattattgactagttattaatagtaatcaattacggggtcattagttcatagcccatatatggagttccgcgttacataacttacggtaaatggcccgcctggctgaccgcccaacgacccccgcccattgacgtcaataatgacgtatgttcccatagtaacgccaatagggactttccattgacgtcaatgggtggagtatttacggtaaactgcccacttggcagtacatcaagtgtatcatatgccaagtacgccccctattgacgtcaatgacggtaaatggcccgcctggcattatgcccagtacatgaccttatgggactttcctacttggcagtacatctacgtattagtcatcgctattaccatggtgatgcggttttggcagtacatcaatgggcgtggatagcggtttgactcacggggatttccaagtctccaccccattgacgtcaatgggagtttgttttggcaccaaaatcaacgggactttccaaaatgtcgtaacaactccgccccattgacgcaaatgggcggtaggcgtgtacggtgggaggtctatataagcagagctctctggctaactagagaacccactgcttactggcttatcgaaattaatacgactcactatagggagacccaagctggctagcgtttaaacttcgggagcaagcttgaactgaaaaaccagaaagttaactggtaagtttagtctttttgtcttttatttcaggtcccggatccggtggtggtgcaaatcaaagaactgctcctcagtggatgttgcctttacttctaggcctgtacggaagtgttacttctgctctaaaagctgcggaattgtacccgcggccgatccaccggtatgtggactctcgggcgccgcgcagtagccggcctcctggcgtcacccagcccagcccaggcccagaccctcacccgggtcccgcggccggcagagttggccccactctgcggccgccgtggcctgcgcaccgacatcgatgcgacctgcacgccccgccgcgcaagttcgaaccaacgtggcctcaaccagatttggaatgtcaaaaagcagagtgtctatttgatgaatttgaggaaatctggaactttgggccacccaggctctctagatgagaccacctatgaaagactagcagaggaaacgctggactctttagcagagttttttgaagaccttgcagacaagccatacacgtttgaggactatgatgtctcctttgggagtggtgtcttaactgtcaaactgggtggagatctaggaacctatgtgatcaacaagcagacgccaaacaagcaaatctggctatcttctccatccagtggacctaagcgttatgactggactgggaaaaactgggtgtactcccacgacggcgtgtccctccatgagctgctggccgcagagctcactaaagccttaaaaaccaaactggacttgtcttccttggcctattccggaaaagatgcttgagcggccctagcgtttaaacgggccctctagagtcgacccgggcggcctcgaggacggggtgaactacgcctgaggatccgatctttttccctctgccaaaaattatggggacatcatgaagccccttgagcatctgacttctggctaataaaggaaatttattttcattgcaatagtgtgttggaattttttgtgtctctcactcggcctaggtagataagtagcatggcgggttaatcattaactacaaggaacccctagtgatggagttggccactccctctctgcgcgctcgctcgctcactgaggccgggcgaccaaaggtcgcccgacgcccgggctttgcccgggcggcctcagtgagcgagcgagcgcgcagccttaattaacctaattcactggccgtcgttttacaacgtcgtgactgggaaaaccctggcgttacccaacttaatcgccttgcagcacatccccctttcgccagctggcgtaatagcgaagaggcccgcaccgatcgcccttcccaacagttgcgcagcctgaatggcgaatgggacgcgccctgtagcggcgcattaagcgcggcgggtgtggtggttacgcgcagcgtgaccgctacacttgccagcgccctagcgcccgctcctttcgctttcttcccttcctttctcgccacgttcgccggctttccccgtcaagctctaaatcgggggctccctttagggttccgatttagtgctttacggcacctcgaccccaaaaaacttgattagggtgatggttcacgtagtgggccatcgccctgatagacggtttttcgccctttgacgttggagtccacgttctttaatagtggactcttgttccaaactggaacaacactcaaccctatctcggtctattcttttgatttataagggattttgccgatttcggcctattggttaaaaaatgagctgatttaacaaaaatttaacgcgaattttaacaaaatattaacgcttacaatttaggtggcacttttcggggaaatgtgcgcggaacccctatttgtttatttttctaaatacattcaaatatgtatccgctcatgagacaataaccctgataaatgcttcaataatattgaaaaaggaagagtatgagtattcaacatttccgtgtcgcccttattcccttttttgcggcattttgccttcctgtttttgctcacccagaaacgctggtgaaagtaaaagatgctgaagatcagttgggtgcacgagtgggttacatcgaactggatctcaacagcggtaagatccttgagagttttcgccccgaagaacgttttccaatgatgagcacttttaaagttctgctatgtggcgcggtattatcccgtattgacgccgggcaagagcaactcggtcgccgcatacactattctcagaatgacttggttgagtactcaccagtcacagaaaagcatcttacggatggcatgacagtaagagaattatgcagtgctgccataaccatgagtgataacactgcggccaacttacttctgacaacgatcggaggaccgaaggagctaaccgcttttttgcacaacatgggggatcatgtaactcgccttgatcgttgggaaccggagctgaatgaagccataccaaacgacgagcgtgacaccacgatgcctgtagcaatggcaacaacgttgcgcaaactattaactggcgaactacttactctagcttcccggcaacaattaatagactggatggaggcggataaagttgcaggaccacttctgcgctcggcccttccggctggctggtttattgctgataaatctggagccggtgagcgtgggtctcgcggtatcattgcagcactggggccagatggtaagccctcccgtatcgtagttatctacacgacggggagtcaggcaactatggatgaacgaaatagacagatcgctgagataggtgcctcactgattaagcattggtaactgtcagaccaagtttactcatatatactttagattgatttaaaacttcatttttaatttaaaaggatctaggtgaagatcctttttgataatctcatgaccaaaatcccttaacgtgagttttcgttccactgagcgtcagaccccgtagaaaagatcaaaggatcttcttgagatcctttttttctgcgcgtaatctgctgcttgcaaacaaaaaaaccaccgctaccagcggtggtttgtttgccggatcaagagctaccaactctttttccgaaggtaactggcttcagcagagcgcagataccaaatactgttcttctagtgtagccgtagttaggccaccacttcaagaactctgtagcaccgcctacatacctcgctctgctaatcctgttaccagtggctgctgccagtggcgataagtcgtgtcttaccgggttggactcaagacgatagttaccggataaggcgcagcggtcgggctgaacggggggttcgtgcacacagcccagcttggagcgaacgacctacaccgaactgagatacctacagcgtgagctatgagaaagcgccacgcttcccgaagggagaaaggcggacaggtatccggtaagcggcagggtcggaacaggagagcgcacgagggagcttccagggggaaacgcctggtatctttatagtcctgtcgggtttcgccacctctgacttgagcgtcgatttttgtgatgctcgtcaggggggcggagcctatggaaaaacgccagcaacgcggcctttttacggttcctggccttttgctggccttttgctcacatgttctttcctgcgttatcccctgattctgtggataaccgtattaccgcctttgagtgagctgataccgctcgccgcagccgaacgaccgagcgcagcgagtcagtgagcgaggaagcggaagagcgcccaatacgcaaaccgcctctccccgcgcgttggccgattcattaatgcagctggcacgacaggtttcccgactggaaagcgggcagtgagcgcaacgcaattaatgtgagttagctcactcattaggcaccccaggctttacactttatgcttccggctcgtatgttgtgtggaattgtgagcggataa

SEQ ID NO: 643 - DNA, 4808 bp, Artificial Sequence
  Description of Artificial Sequence: Synthetic polynucleotide
caatttcacacaggaaacagctatgaccatgattacgccagatttaattaaggccttaattaggctgcgcgctcgctcgctcactgaggccgcccgggcaaagcccgggcgtcgggcgacctttggtcgcccggcctcagtgagcgagcgagcgcgcagagagggagtgtagccatgctctaggaagatcaattcaattcacgcgtcgacattgattattgactagttattaatagtaatcaattacggggtcattagttcatagcccatatatggagttccgcgttacataacttacggtaaatggcccgcctggctgaccgcccaacgacccccgcccattgacgtcaataatgacgtatgttcccatagtaacgccaatagggactttccattgacgtcaatgggtggagtatttacggtaaactgcccacttggcagtacatcaagtgtatcatatgccaagtacgccccctattgacgtcaatgacggtaaatggcccgcctggcattatgcccagtacatgaccttatgggactttcctacttggcagtacatctacgtattagtcatcgctattaccatggtgatgcggttttggcagtacatcaatgggcgtggatagcggtttgactcacggggatttccaagtctccaccccattgacgtcaatgggagtttgttttggcaccaaaatcaacgggactttccaaaatgtcgtaacaactccgccccattgacgcaaatgggcggtaggcgtgtacggtgggaggtctatataagcagagctctctggctaactagagaacccactgcttactggcttatcgaaattaatacgactcactatagggagacccaagctggctagcgtttaaacttcgggagcaagcttgaactgaaaaaccagaaagttaactggtaagtttagtctttttgtcttttatttcaggtcccggatccggtggtggtgcaaatcaaagaactgctcctcagtggatgttgcctttacttctaggcctgtacggaagtgttacttctgctctaaaagctgcggaattgtacccgcggccgatccaccggtatgtggacactcgggcgacgcgccgtggctgggctgcttgcttccccaagtcccgcacaggcgcaaaccctcacaagggtcccacggccagctgaattggccccgctgtgcggtcggaggggcctgcgaacagatatagacgcaacgtgcacccccagaagagcaagcagcaaccagagaggcctcaatcagatttggaacgtcaagaaacagagtgtctatctgatgaacctccgcaaatcagggacccttggtcatccgggatctcttgatgaaacgacctatgaacggctggctgaggagacgcttgactccctggcagagttcttcgaggatctggctgataagccatacacgttcgaggactatgatgtttcttttggttctggcgtcctgacggtgaaactcggaggggatctgggcacttacgttatcaacaaacagactcccaataaacagatttggttgtctagtcctagcagtggcccaaaacgctatgactggacgggcaagaactgggtgtactcccacgatggagttagcctgcacgaacttctggccgctgagcttactaaagcgctgaagactaagctggatctctccagcctcgcatacagcggcaaagacgcctagctcgaggacggggtgaactacgcctgaggatccgatctttttccctctgccaaaaattatggggacatcatgaagccccttgagcatctgacttctggctaataaaggaaatttattttcattgcaatagtgtgttggaattttttgtgtctctcactcggcctaggtagataagtagcatggcgggttaatcattaactacaaggaacccctagtgatggagttggccactccctctctgcgcgctcgctcgctcactgaggccgggcgaccaaaggtcgcccgacgcccgggctttgcccgggcggcctcagtgagcgagcgagcgcgcagccttaattaacctaattcactggccgtcgttttacaacgtcgtgactgggaaaaccctggcgttacccaacttaatcgccttgcagcacatccccctttcgccagctggcgtaatagcgaagaggcccgcaccgatcgcccttcccaacagttgcgcagcctgaatggcgaatgggacgcgccctgtagcggcgcattaagcgcggcgggtgtggtggttacgcgcagcgtgaccgctacacttgccagcgccctagcgcccgctcctttcgctttcttcccttcctttctcgccacgttcgccggctttccccgtcaagctctaaatcgggggctccctttagggttccgatttagtgctttacggcacctcgaccccaaaaaacttgattagggtgatggttcacgtagtgggccatcgccctgatagacggtttttcgccctttgacgttggagtccacgttctttaatagtggactcttgttccaaactggaacaacactcaaccctatctcggtctattcttttgatttataagggattttgccgatttcggcctattggttaaaaaatgagctgatttaacaaaaatttaacgcgaattttaacaaaatattaacgcttacaatttaggtggcacttttcggggaaatgtgcgcggaacccctatttgtttatttttctaaatacattcaaatatgtatccgctcatgagacaataaccctgataaatgcttcaataatattgaaaaaggaagagtatgagtattcaacatttccgtgtcgcccttattcccttttttgcggcattttgccttcctgtttttgctcacccagaaacgctggtgaaagtaaaagatgctgaagatcagttgggtgcacgagtgggttacatcgaactggatctcaacagcggtaagatccttgagagttttcgccccgaagaacgttttccaatgatgagcacttttaaagttctgctatgtggcgcggtattatcccgtattgacgccgggcaagagcaactcggtcgccgcatacactattctcagaatgacttggttgagtactcaccagtcacagaaaagcatcttacggatggcatgacagtaagagaattatgcagtgctgccataaccatgagtgataacactgcggccaacttacttctgacaacgatcggaggaccgaaggagctaaccgcttttttgcacaacatgggggatcatgtaactcgccttgatcgttgggaaccggagctgaatgaagccataccaaacgacgagcgtgacaccacgatgcctgtagcaatggcaacaacgttgcgcaaactattaactggcgaactacttactctagcttcccggcaacaattaatagactggatggaggcggataaagttgcaggaccacttctgcgctcggcccttccggctggctggtttattgctgataaatctggagccggtgagcgtgggtctcgcggtatcattgcagcactggggccagatggtaagccctcccgtatcgtagttatctacacgacggggagtcaggcaactatggatgaacgaaatagacagatcgctgagataggtgcctcactgattaagcattggtaactgtcagaccaagtttactcatatatactttagattgatttaaaacttcatttttaatttaaaaggatctaggtgaagatcctttttgataatctcatgaccaaaatcccttaacgtgagttttcgttccactgagcgtcagaccccgtagaaaagatcaaaggatcttcttgagatcctttttttctgcgcgtaatctgctgcttgcaaacaaaaaaaccaccgctaccagcggtggtttgtttgccggatcaagagctaccaactctttttccgaaggtaactggcttcagcagagcgcagataccaaatactgttcttctagtgtagccgtagttaggccaccacttcaagaactctgtagcaccgcctacatacctcgctctgctaatcctgttaccagtggctgctgccagtggcgataagtcgtgtcttaccgggttggactcaagacgatagttaccggataaggcgcagcggtcgggctgaacggggggttcgtgcacacagcccagcttggagcgaacgacctacaccgaactgagatacctacagcgtgagctatgagaaagcgccacgcttcccgaagggagaaaggcggacaggtatccggtaagcggcagggtcggaacaggagagcgcacgagggagcttccagggggaaacgcctggtatctttatagtcctgtcgggtttcgccacctctgacttgagcgtcgatttttgtgatgctcgtcaggggggcggagcctatggaaaaacgccagcaacgcggcctttttacggttcctggccttttgctggccttttgctcacatgttctttcctgcgttatcccctgattctgtggataaccgtattaccgcctttgagtgagctgataccgctcgccgcagccgaacgaccgagcgcagcgagtcagtgagcgaggaagcggaagagcgcccaatacgcaaaccgcctctccccgcgcgttggccgattcattaatgcagctggcacgacaggtttcccgactggaaagcgggcagtgagcgcaacgcaattaatgtgagttagctcactcattaggcaccccaggctttacactttatgcttccggctcgtatgttgtgtggaattgtgagcggataa

SEQ ID NO: 644 - DNA, 4808 bp, Artificial Sequence
  Description of Artificial Sequence: Synthetic polynucleotide
caatttcacacaggaaacagctatgaccatgattacgccagatttaattaaggccttaattaggctgcgcgctcgctcgctcactgaggccgcccgggcaaagcccgggcgtcgggcgacctttggtcgcccggcctcagtgagcgagcgagcgcgcagagagggagtgtagccatgctctaggaagatcaattcaattcacgcgtcgacattgattattgactagttattaatagtaatcaattacggggtcattagttcatagcccatatatggagttccgcgttacataacttacggtaaatggcccgcctggctgaccgcccaacgacccccgcccattgacgtcaataatgacgtatgttcccatagtaacgccaatagggactttccattgacgtcaatgggtggagtatttacggtaaactgcccacttggcagtacatcaagtgtatcatatgccaagtacgccccctattgacgtcaatgacggtaaatggcccgcctggcattatgcccagtacatgaccttatgggactttcctacttggcagtacatctacgtattagtcatcgctattaccatggtgatgcggttttggcagtacatcaatgggcgtggatagcggtttgactcacggggatttccaagtctccaccccattgacgtcaatgggagtttgttttggcaccaaaatcaacgggactttccaaaatgtcgtaacaactccgccccattgacgcaaatgggcggtaggcgtgtacggtgggaggtctatataagcagagctctctggctaactagagaacccactgcttactggcttatcgaaattaatacgactcactatagggagacccaagctggctagcgtttaaacttcgggagcaagcttgaactgaaaaaccagaaagttaactggtaagtttagtctttttgtcttttatttcaggtcccggatccggtggtggtgcaaatcaaagaactgctcctcagtggatgttgcctttacttctaggcctgtacggaagtgttacttctgctctaaaagctgcggaattgtacccgcggccgatccaccggtatgtggactctgggtcgacgcgccgtagccggtctcttggcctccccatcccctgcgcaggcacagacccttacacgagttccacggcccgctgaactggcaccactctgcggacgccggggcctgagaaccgatattgacgctacgtgcactccccgacgagcctcttctaatcagagggggctcaaccagatctggaacgtgaagaagcagtcagtctacttgatgaatctgagaaagagcgggacccttgggcaccccgggtctctcgacgagactacatacgagaggctggccgaggagactttggactctctcgccgaattcttcgaggatttggcagacaagccgtacacctttgaagactacgatgtctcattcggatcaggggtgctgacggttaaactggggggcgatctcggaacctacgtcataaacaaacagacacccaataagcagatctggttgtctagcccatcatccggtcctaaacggtacgactggaccggcaagaactgggtctactcccatgacggagtcagtcttcatgaactgcttgccgcagagctgaccaaggctcttaagacgaaactggatctctctagcctggcctactccgggaaggatgcatagctcgaggacggggtgaactacgcctgaggatccgatctttttccctctgccaaaaattatggggacatcatgaagccccttgagcatctgacttctggctaataaaggaaatttattttcattgcaatagtgtgttggaattttttgtgtctctcactcggcctaggtagataagtagcatggcgggttaatcattaactacaaggaacccctagtgatggagttggccactccctctctgcgcgctcgctcgctcactgaggccgggcgaccaaaggtcgcccgacgcccgggctttgcccgggcggcctcagtgagcgagcgagcgcgcagccttaattaacctaattcactggccgtcgttttacaacgtcgtgactgggaaaaccctggcgttacccaacttaatcgccttgcagcacatccccctttcgccagctggcgtaatagcgaagaggcccgcaccgatcgcccttcccaacagttgcgcagcctgaatggcgaatgggacgcgccctgtagcggcgcattaagcgcggcgggtgtggtggttacgcgcagcgtgaccgctacacttgccagcgccctagcgcccgctcctttcgctttcttcccttcctttctcgccacgttcgccggctttccccgtcaagctctaaatcgggggctccctttagggttccgatttagtgctttacggcacctcgaccccaaaaaacttgattagggtgatggttcacgtagtgggccatcgccctgatagacggtttttcgccctttgacgttggagtccacgttctttaatagtggactcttgttccaaactggaacaacactcaaccctatctcggtctattcttttgatttataagggattttgccgatttcggcctattggttaaaaaatgagctgatttaacaaaaatttaacgcgaattttaacaaaatattaacgcttacaatttaggtggcacttttcggggaaatgtgcgcggaacccctatttgtttatttttctaaatacattcaaatatgtatccgctcatgagacaataaccctgataaatgcttcaataatattgaaaaaggaagagtatgagtattcaacatttccgtgtcgcccttattcccttttttgcggcattttgccttcctgtttttgctcacccagaaacgctggtgaaagtaaaagatgctgaagatcagttgggtgcacgagtgggttacatcgaactggatctcaacagcggtaagatccttgagagttttcgccccgaagaacgttttccaatgatgagcacttttaaagttctgctatgtggcgcggtattatcccgtattgacgccgggcaagagcaactcggtcgccgcatacactattctcagaatgacttggttgagtactcaccagtcacagaaaagcatcttacggatggcatgacagtaagagaattatgcagtgctgccataaccatgagtgataacactgcggccaacttacttctgacaacgatcggaggaccgaaggagctaaccgcttttttgcacaacatgggggatcatgtaactcgccttgatcgttgggaaccggagctgaatgaagccataccaaacgacgagcgtgacaccacgatgcctgtagcaatggcaacaacgttgcgcaaactattaactggcgaactacttactctagcttcccggcaacaattaatagactggatggaggcggataaagttgcaggaccacttctgcgctcggcccttccggctggctggtttattgctgataaatctggagccggtgagcgtgggtctcgcggtatcattgcagcactggggccagatggtaagccctcccgtatcgtagttatctacacgacggggagtcaggcaactatggatgaacgaaatagacagatcgctgagataggtgcctcactgattaagcattggtaactgtcagaccaagtttactcatatatactttagattgatttaaaacttcatttttaatttaaaaggatctaggtgaagatcctttttgataatctcatgaccaaaatcccttaacgtgagttttcgttccactgagcgtcagaccccgtagaaaagatcaaaggatcttcttgagatcctttttttctgcgcgtaatctgctgcttgcaaacaaaaaaaccaccgctaccagcggtggtttgtttgccggatcaagagctaccaactctttttccgaaggtaactggcttcagcagagcgcagataccaaatactgttcttctagtgtagccgtagttaggccaccacttcaagaactctgtagcaccgcctacatacctcgctctgctaatcctgttaccagtggctgctgccagtggcgataagtcgtgtcttaccgggttggactcaagacgatagttaccggataaggcgcagcggtcgggctgaacggggggttcgtgcacacagcccagcttggagcgaacgacctacaccgaactgagatacctacagcgtgagctatgagaaagcgccacgcttcccgaagggagaaaggcggacaggtatccggtaagcggcagggtcggaacaggagagcgcacgagggagcttccagggggaaacgcctggtatctttatagtcctgtcgggtttcgccacctctgacttgagcgtcgatttttgtgatgctcgtcaggggggcggagcctatggaaaaacgccagcaacgcggcctttttacggttcctggccttttgctggccttttgctcacatgttctttcctgcgttatcccctgattctgtggataaccgtattaccgcctttgagtgagctgataccgctcgccgcagccgaacgaccgagcgcagcgagtcagtgagcgaggaagcggaagagcgcccaatacgcaaaccgcctctccccgcgcgttggccgattcattaatgcagctggcacgacaggtttcccgactggaaagcgggcagtgagcgcaacgcaattaatgtgagttagctcactcattaggcaccccaggctttacactttatgcttccggctcgtatgttgtgtggaattgtgagcggataa

SEQ ID NO: 645 - DNA, 4808 bp, Artificial Sequence
  Description of Artificial Sequence: Synthetic polynucleotide
caatttcacacaggaaacagctatgaccatgattacgccagatttaattaaggccttaattaggctgcgcgctcgctcgctcactgaggccgcccgggcaaagcccgggcgtcgggcgacctttggtcgcccggcctcagtgagcgagcgagcgcgcagagagggagtgtagccatgctctaggaagatcaattcaattcacgcgtcgacattgattattgactagttattaatagtaatcaattacggggtcattagttcatagcccatatatggagttccgcgttacataacttacggtaaatggcccgcctggctgaccgcccaacgacccccgcccattgacgtcaataatgacgtatgttcccatagtaacgccaatagggactttccattgacgtcaatgggtggagtatttacggtaaactgcccacttggcagtacatcaagtgtatcatatgccaagtacgccccctattgacgtcaatgacggtaaatggcccgcctggcattatgcccagtacatgaccttatgggactttcctacttggcagtacatctacgtattagtcatcgctattaccatggtgatgcggttttggcagtacatcaatgggcgtggatagcggtttgactcacggggatttccaagtctccaccccattgacgtcaatgggagtttgttttggcaccaaaatcaacgggactttccaaaatgtcgtaacaactccgccccattgacgcaaatgggcggtaggcgtgtacggtgggaggtctatataagcagagctctctggctaactagagaacccactgcttactggcttatcgaaattaatacgactcactatagggagacccaagctggctagcgtttaaacttcgggagcaagcttgaactgaaaaaccagaaagttaactggtaagtttagtctttttgtcttttatttcaggtcccggatccggtggtggtgcaaatcaaagaactgctcctcagtggatgttgcctttacttctaggcctgtacggaagtgttacttctgctctaaaagctgcggaattgtacccgcggccgatccaccggtatgtggactctcgggcgacgcgccgtagccggtctcctggcttccccaagccctgcacaggcacagaccctcacacgggtcccacggccagctgaattggccccactctgcggtcgccggggcctgcgaaccgatatagacgcaacgtgcactccccgacgagcaagttccaaccagagagggctcaaccagatttggaacgtcaagaagcagagtgtctatttgatgaatctgagaaaatccgggacccttgggcaccccggatctcttgatgaaactacctatgaaaggctggccgaggagacgctggactctctggcagagttcttcgaggatctggcagacaagccatacacgtttgaggactatgatgtctcttttggatctggcgtcctgacggttaaactgggaggggatctcggaacctacgttatcaacaaacagactcccaataagcagatctggttgtctagtccatccagtggtcctaaacgctatgactggacgggcaagaactgggtgtactcccacgacggagttagccttcatgaactgctggccgcagagctgactaaagctcttaagactaaactggatctctctagcctggcctactccgggaaagatgcctagctcgaggacggggtgaactacgcctgaggatccgatctttttccctctgccaaaaattatggggacatcatgaagccccttgagcatctgacttctggctaataaaggaaatttattttcattgcaatagtgtgttggaattttttgtgtctctcactcggcctaggtagataagtagcatggcgggttaatcattaactacaaggaacccctagtgatggagttggccactccctctctgcgcgctcgctcgctcactgaggccgggcgaccaaaggtcgcccgacgcccgggctttgcccgggcggcctcagtgagcgagcgagcgcgcagccttaattaacctaattcactggccgtcgttttacaacgtcgtgactgggaaaaccctggcgttacccaacttaatcgccttgcagcacatccccctttcgccagctggcgtaatagcgaagaggcccgcaccgatcgcccttcccaacagttgcgcagcctgaatggcgaatgggacgcgccctgtagcggcgcattaagcgcggcgggtgtggtggttacgcgcagcgtgaccgctacacttgccagcgccctagcgcccgctcctttcgctttcttcccttcctttctcgccacgttcgccggctttccccgtcaagctctaaatcgggggctccctttagggttccgatttagtgctttacggcacctcgaccccaaaaaacttgattagggtgatggttcacgtagtgggccatcgccctgatagacggtttttcgccctttgacgttggagtccacgttctttaatagtggactcttgttccaaactggaacaacactcaaccctatctcggtctattcttttgatttataagggattttgccgatttcggcctattggttaaaaaatgagctgatttaacaaaaatttaacgcgaattttaacaaaatattaacgcttacaatttaggtggcacttttcggggaaatgtgcgcggaacccctatttgtttatttttctaaatacattcaaatatgtatccgctcatgagacaataaccctgataaatgcttcaataatattgaaaaaggaagagtatgagtattcaacatttccgtgtcgcccttattcccttttttgcggcattttgccttcctgtttttgctcacccagaaacgctggtgaaagtaaaagatgctgaagatcagttgggtgcacgagtgggttacatcgaactggatctcaacagcggtaagatccttgagagttttcgccccgaagaacgttttccaatgatgagcacttttaaagttctgctatgtggcgcggtattatcccgtattgacgccgggcaagagcaactcggtcgccgcatacactattctcagaatgacttggttgagtactcaccagtcacagaaaagcatcttacggatggcatgacagtaagagaattatgcagtgctgccataaccatgagtgataacactgcggccaacttacttctgacaacgatcggaggaccgaaggagctaaccgcttttttgcacaacatgggggatcatgtaactcgccttgatcgttgggaaccggagctgaatgaagccataccaaacgacgagcgtgacaccacgatgcctgtagcaatggcaacaacgttgcgcaaactattaactggcgaactacttactctagcttcccggcaacaattaatagactggatggaggcggataaagttgcaggaccacttctgcgctcggcccttccggctggctggtttattgctgataaatctggagccggtgagcgtgggtctcgcggtatcattgcagcactggggccagatggtaagccctcccgtatcgtagttatctacacgacggggagtcaggcaactatggatgaacgaaatagacagatcgctgagataggtgcctcactgattaagcattggtaactgtcagaccaagtttactcatatatactttagattgatttaaaacttcatttttaatttaaaaggatctaggtgaagatcctttttgataatctcatgaccaaaatcccttaacgtgagttttcgttccactgagcgtcagaccccgtagaaaagatcaaaggatcttcttgagatcctttttttctgcgcgtaatctgctgcttgcaaacaaaaaaaccaccgctaccagcggtggtttgtttgccggatcaagagctaccaactctttttccgaaggtaactggcttcagcagagcgcagataccaaatactgttcttctagtgtagccgtagttaggccaccacttcaagaactctgtagcaccgcctacatacctcgctctgctaatcctgttaccagtggctgctgccagtggcgataagtcgtgtcttaccgggttggactcaagacgatagttaccggataaggcgcagcggtcgggctgaacggggggttcgtgcacacagcccagcttggagcgaacgacctacaccgaactgagatacctacagcgtgagctatgagaaagcgccacgcttcccgaagggagaaaggcggacaggtatccggtaagcggcagggtcggaacaggagagcgcacgagggagcttccagggggaaacgcctggtatctttatagtcctgtcgggtttcgccacctctgacttgagcgtcgatttttgtgatgctcgtcaggggggcggagcctatggaaaaacgccagcaacgcggcctttttacggttcctggccttttgctggccttttgctcacatgttctttcctgcgttatcccctgattctgtggataaccgtattaccgcctttgagtgagctgataccgctcgccgcagccgaacgaccgagcgcagcgagtcagtgagcgaggaagcggaagagcgcccaatacgcaaaccgcctctccccgcgcgttggccgattcattaatgcagctggcacgacaggtttcccgactggaaagcgggcagtgagcgcaacgcaattaatgtgagttagctcactcattaggcaccccaggctttacactttatgcttccggctcgtatgttgtgtggaattgtgagcggataa

SEQ ID NO: 646 - DNA, 4808 bp, Artificial Sequence
  Description of Artificial Sequence: Synthetic polynucleotide
caatttcacacaggaaacagctatgaccatgattacgccagatttaattaaggccttaattaggctgcgcgctcgctcgctcactgaggccgcccgggcaaagcccgggcgtcgggcgacctttggtcgcccggcctcagtgagcgagcgagcgcgcagagagggagtgtagccatgctctaggaagatcaattcaattcacgcgtcgacattgattattgactagttattaatagtaatcaattacggggtcattagttcatagcccatatatggagttccgcgttacataacttacggtaaatggcccgcctggctgaccgcccaacgacccccgcccattgacgtcaataatgacgtatgttcccatagtaacgccaatagggactttccattgacgtcaatgggtggagtatttacggtaaactgcccacttggcagtacatcaagtgtatcatatgccaagtacgccccctattgacgtcaatgacggtaaatggcccgcctggcattatgcccagtacatgaccttatgggactttcctacttggcagtacatctacgtattagtcatcgctattaccatggtgatgcggttttggcagtacatcaatgggcgtggatagcggtttgactcacggggatttccaagtctccaccccattgacgtcaatgggagtttgttttggcaccaaaatcaacgggactttccaaaatgtcgtaacaactccgccccattgacgcaaatgggcggtaggcgtgtacggtgggaggtctatataagcagagctctctggctaactagagaacccactgcttactggcttatcgaaattaatacgactcactatagggagacccaagctggctagcgtttaaacttcgggagcaagcttgaactgaaaaaccagaaagttaactggtaagtttagtctttttgtcttttatttcaggtcccggatccggtggtggtgcaaatcaaagaactgctcctcagtggatgttgcctttacttctaggcctgtacggaagtgttacttctgctctaaaagctgcggaattgtacccgcggccgatccaccggtatgtggactctggggcgacgcgccgtggccgggctcctggcatccccatcccctgcgcaggcgcaaaccctcacacgggttccacggccagctgaactggccccactgtgcggccggcggggcctgagaacagatattgacgcaacgtgcactcccagaagagccagcagcaaccagagggggttgaatcagatctggaacgtcaagaagcagtcagtgtacctgatgaatctccgaaaaagcgggacccttggtcaccccggatctctcgatgaaaccacatatgaacggctggccgaggaaacgctggactccctggccgagttcttcgaggacctggcagacaagccgtacaccttcgaagactatgatgtttcattcggaagtggcgtgctgacggtcaaactgggaggcgatctgggaacctacgttataaacaaacagactcccaataaacagatctggttgtctagtccatccagcggtcctaaacgctatgactggacgggcaagaactgggtctactcccacgacggagttagccttcacgaactgttggccgcagagctgacaaaggcgcttaagacgaaactggatctctctagcctggcctactccggcaaagatgcctagctcgaggacggggtgaactacgcctgaggatccgatctttttccctctgccaaaaattatggggacatcatgaagccccttgagcatctgacttctggctaataaaggaaatttattttcattgcaatagtgtgttggaattttttgtgtctctcactcggcctaggtagataagtagcatggcgggttaatcattaactacaaggaacccctagtgatggagttggccactccctctctgcgcgctcgctcgctcactgaggccgggcgaccaaaggtcgcccgacgcccgggctttgcccgggcggcctcagtgagcgagcgagcgcgcagccttaattaacctaattcactggccgtcgttttacaacgtcgtgactgggaaaaccctggcgttacccaacttaatcgccttgcagcacatccccctttcgccagctggcgtaatagcgaagaggcccgcaccgatcgcccttcccaacagttgcgcagcctgaatggcgaatgggacgcgccctgtagcggcgcattaagcgcggcgggtgtggtggttacgcgcagcgtgaccgctacacttgccagcgccctagcgcccgctcctttcgctttcttcccttcctttctcgccacgttcgccggctttccccgtcaagctctaaatcgggggctccctttagggttccgatttagtgctttacggcacctcgaccccaaaaaacttgattagggtgatggttcacgtagtgggccatcgccctgatagacggtttttcgccctttgacgttggagtccacgttctttaatagtggactcttgttccaaactggaacaacactcaaccctatctcggtctattcttttgatttataagggattttgccgatttcggcctattggttaaaaaatgagctgatttaacaaaaatttaacgcgaattttaacaaaatattaacgcttacaatttaggtggcacttttcggggaaatgtgcgcggaacccctatttgtttatttttctaaatacattcaaatatgtatccgctcatgagacaataaccctgataaatgcttcaataatattgaaaaaggaagagtatgagtattcaacatttccgtgtcgcccttattcccttttttgcggcattttgccttcctgtttttgctcacccagaaacgctggtgaaagtaaaagatgctgaagatcagttgggtgcacgagtgggttacatcgaactggatctcaacagcggtaagatccttgagagttttcgccccgaagaacgttttccaatgatgagcacttttaaagttctgctatgtggcgcggtattatcccgtattgacgccgggcaagagcaactcggtcgccgcatacactattctcagaatgacttggttgagtactcaccagtcacagaaaagcatcttacggatggcatgacagtaagagaattatgcagtgctgccataaccatgagtgataacactgcggccaacttacttctgacaacgatcggaggaccgaaggagctaaccgcttttttgcacaacatgggggatcatgtaactcgccttgatcgttgggaaccggagctgaatgaagccataccaaacgacgagcgtgacaccacgatgcctgtagcaatggcaacaacgttgcgcaaactattaactggcgaactacttactctagcttcccggcaacaattaatagactggatggaggcggataaagttgcaggaccacttctgcgctcggcccttccggctggctggtttattgctgataaatctggagccggtgagcgtgggtctcgcggtatcattgcagcactggggccagatggtaagccctcccgtatcgtagttatctacacgacggggagtcaggcaactatggatgaacgaaatagacagatcgctgagataggtgcctcactgattaagcattggtaactgtcagaccaagtttactcatatatactttagattgatttaaaacttcatttttaatttaaaaggatctaggtgaagatcctttttgataatctcatgaccaaaatcccttaacgtgagttttcgttccactgagcgtcagaccccgtagaaaagatcaaaggatcttcttgagatcctttttttctgcgcgtaatctgctgcttgcaaacaaaaaaaccaccgctaccagcggtggtttgtttgccggatcaagagctaccaactctttttccgaaggtaactggcttcagcagagcgcagataccaaatactgttcttctagtgtagccgtagttaggccaccacttcaagaactctgtagcaccgcctacatacctcgctctgctaatcctgttaccagtggctgctgccagtggcgataagtcgtgtcttaccgggttggactcaagacgatagttaccggataaggcgcagcggtcgggctgaacggggggttcgtgcacacagcccagcttggagcgaacgacctacaccgaactgagatacctacagcgtgagctatgagaaagcgccacgcttcccgaagggagaaaggcggacaggtatccggtaagcggcagggtcggaacaggagagcgcacgagggagcttccagggggaaacgcctggtatctttatagtcctgtcgggtttcgccacctctgacttgagcgtcgatttttgtgatgctcgtcaggggggcggagcctatggaaaaacgccagcaacgcggcctttttacggttcctggccttttgctggccttttgctcacatgttctttcctgcgttatcccctgattctgtggataaccgtattaccgcctttgagtgagctgataccgctcgccgcagccgaacgaccgagcgcagcgagtcagtgagcgaggaagcggaagagcgcccaatacgcaaaccgcctctccccgcgcgttggccgattcattaatgcagctggcacgacaggtttcccgactggaaagcgggcagtgagcgcaacgcaattaatgtgagttagctcactcattaggcaccccaggctttacactttatgcttccggctcgtatgttgtgtggaattgtgagcggataa

SEQ ID NO: 647 - DNA, 4863 bp, Artificial Sequence
  Description of Artificial Sequence: Synthetic polynucleotide
caatttcacacaggaaacagctatgaccatgattacgccagatttaattaaggccttaattaggctgcgcgctcgctcgctcactgaggccgcccgggcaaagcccgggcgtcgggcgacctttggtcgcccggcctcagtgagcgagcgagcgcgcagagagggagtgtagccatgctctaggaagatcaattcaattcacgcgtcgacattgattattgactagttattaatagtaatcaattacggggtcattagttcatagcccatatatggagttccgcgttacataacttacggtaaatggcccgcctggctgaccgcccaacgacccccgcccattgacgtcaataatgacgtatgttcccatagtaacgccaatagggactttccattgacgtcaatgggtggagtatttacggtaaactgcccacttggcagtacatcaagtgtatcatatgccaagtacgccccctattgacgtcaatgacggtaaatggcccgcctggcattatgcccagtacatgaccttatgggactttcctacttggcagtacatctacgtattagtcatcgctattaccatggtgatgcggttttggcagtacatcaatgggcgtggatagcggtttgactcacggggatttccaagtctccaccccattgacgtcaatgggagtttgttttggcaccaaaatcaacgggactttccaaaatgtcgtaacaactccgccccattgacgcaaatgggcggtaggcgtgtacggtgggaggtctatataagcagagctctctggctaactagagaacccactgcttactggcttatcgaaattaatacgactcactatagggagacccaagctggctagcgtttaaacttcgggagcaagcttgaactgaaaaaccagaaagttaactggtaagtttagtctttttgtcttttatttcaggtcccggatccggtggtggtgcaaatcaaagaactgctcctcagtggatgttgcctttacttctaggcctgtacggaagtgttacttctgctctaaaagctgcggaattgtacccgcggccgatccaccggtgccgccaccatgtggactctcgggcgccgcgcagtagccggcctcctggcgtcacccagcccagcccaggcccagaccctcacccgggtcccgcggccggcagagttggccccactctgcggccgccgtggcctgcgcaccgacatcgatgcgacctgcacgccccgccgcgcaagttcgaaccaacgtggcctcaaccagatttggaatgtcaaaaagcagagtgtctatttgatgaatttgaggaaatctggaactttgggccacccaggctctctagatgagaccacctatgaaagactagcagaggaaacgctggactctttagcagagttttttgaagaccttgcagacaagccatacacgtttgaggactatgatgtctcctttgggagtggtgtcttaactgtcaaactgggtggagatctaggaacctatgtgatcaacaagcagacgccaaacaagcaaatctggctatcttctccatccagtggacctaagcgttatgactggactgggaaaaactgggtgtactcccacgacggcgtgtccctccatgagctgctggccgcagagctcactaaagccttaaaaaccaaactggacttgtcttccttggcctattccggaaaagatgcttgagcggccctagcgtttaaacgggccctctagagtcgacccgggcggcctcgaggacggggtgaactacgcctgaggatccgatctttttccctctgccaaaaattatggggacatcatgaagccccttgagcatctgacttctggctaataaaggaaatttattttcattgcaatagtgtgttggaattttttgtgtctctcactcggcctaggtagataagtagcatggcgggttaatcattaactacaaggaacccctagtgatggagttggccactccctctctgcgcgctcgctcgctcactgaggccgggcgaccaaaggtcgcccgacgcccgggctttgcccgggcggcctcagtgagcgagcgagcgcgcagccttaattaacctaattcactggccgtcgttttacaacgtcgtgactgggaaaaccctggcgttacccaacttaatcgccttgcagcacatccccctttcgccagctggcgtaatagcgaagaggcccgcaccgatcgcccttcccaacagttgcgcagcctgaatggcgaatgggacgcgccctgtagcggcgcattaagcgcggcgggtgtggtggttacgcgcagcgtgaccgctacacttgccagcgccctagcgcccgctcctttcgctttcttcccttcctttctcgccacgttcgccggctttccccgtcaagctctaaatcgggggctccctttagggttccgatttagtgctttacggcacctcgaccccaaaaaacttgattagggtgatggttcacgtagtgggccatcgccctgatagacggtttttcgccctttgacgttggagtccacgttctttaatagtggactcttgttccaaactggaacaacactcaaccctatctcggtctattcttttgatttataagggattttgccgatttcggcctattggttaaaaaatgagctgatttaacaaaaatttaacgcgaattttaacaaaatattaacgcttacaatttaggtggcacttttcggggaaatgtgcgcggaacccctatttgtttatttttctaaatacattcaaatatgtatccgctcatgagacaataaccctgataaatgcttcaataatattgaaaaaggaagagtatgagtattcaacatttccgtgtcgcccttattcccttttttgcggcattttgccttcctgtttttgctcacccagaaacgctggtgaaagtaaaagatgctgaagatcagttgggtgcacgagtgggttacatcgaactggatctcaacagcggtaagatccttgagagttttcgccccgaagaacgttttccaatgatgagcacttttaaagttctgctatgtggcgcggtattatcccgtattgacgccgggcaagagcaactcggtcgccgcatacactattctcagaatgacttggttgagtactcaccagtcacagaaaagcatcttacggatggcatgacagtaagagaattatgcagtgctgccataaccatgagtgataacactgcggccaacttacttctgacaacgatcggaggaccgaaggagctaaccgcttttttgcacaacatgggggatcatgtaactcgccttgatcgttgggaaccggagctgaatgaagccataccaaacgacgagcgtgacaccacgatgcctgtagcaatggcaacaacgttgcgcaaactattaactggcgaactacttactctagcttcccggcaacaattaatagactggatggaggcggataaagttgcaggaccacttctgcgctcggcccttccggctggctggtttattgctgataaatctggagccggtgagcgtgggtctcgcggtatcattgcagcactggggccagatggtaagccctcccgtatcgtagttatctacacgacggggagtcaggcaactatggatgaacgaaatagacagatcgctgagataggtgcctcactgattaagcattggtaactgtcagaccaagtttactcatatatactttagattgatttaaaacttcatttttaatttaaaaggatctaggtgaagatcctttttgataatctcatgaccaaaatcccttaacgtgagttttcgttccactgagcgtcagaccccgtagaaaagatcaaaggatcttcttgagatcctttttttctgcgcgtaatctgctgcttgcaaacaaaaaaaccaccgctaccagcggtggtttgtttgccggatcaagagctaccaactctttttccgaaggtaactggcttcagcagagcgcagataccaaatactgttcttctagtgtagccgtagttaggccaccacttcaagaactctgtagcaccgcctacatacctcgctctgctaatcctgttaccagtggctgctgccagtggcgataagtcgtgtcttaccgggttggactcaagacgatagttaccggataaggcgcagcggtcgggctgaacggggggttcgtgcacacagcccagcttggagcgaacgacctacaccgaactgagatacctacagcgtgagctatgagaaagcgccacgcttcccgaagggagaaaggcggacaggtatccggtaagcggcagggtcggaacaggagagcgcacgagggagcttccagggggaaacgcctggtatctttatagtcctgtcgggtttcgccacctctgacttgagcgtcgatttttgtgatgctcgtcaggggggcggagcctatggaaaaacgccagcaacgcggcctttttacggttcctggccttttgctggccttttgctcacatgttctttcctgcgttatcccctgattctgtggataaccgtattaccgcctttgagtgagctgataccgctcgccgcagccgaacgaccgagcgcagcgagtcagtgagcgaggaagcggaagagcgcccaatacgcaaaccgcctctccccgcgcgttggccgattcattaatgcagctggcacgacaggtttcccgactggaaagcgggcagtgagcgcaacgcaattaatgtgagttagctcactcattaggcaccccaggctttacactttatgcttccggctcgtatgttgtgtggaattgtgagcggataa

SEQ ID NO: 648 - DNA, 5533 bp, Artificial Sequence
  Description of Artificial Sequence: Synthetic polynucleotide
caatttcacacaggaaacagctatgaccatgattacgccagatttaattaaggccttaattaggctgcgcgctcgctcgctcactgaggccgcccgggcaaagcccgggcgtcgggcgacctttggtcgcccggcctcagtgagcgagcgagcgcgcagagagggagtgtagccatgctctaggaagatcaattcaattcacgcgtactatagctagagctcccaggctcaagtgatcctcccgcctcagcctcctgagtagctgagatcacaggcatgcactaccacactcggctcacatttgacatcctctaaagcatatataaaatgtgaagaaaactttcacaatttgcatccctttgtaatatgtaacagaaataaaattctcttttaaaatctatcaacaataggcaaggcacggtggctcacgcctgtcgtctcagcactttgtgaggcccaggcgggcagatcgtttgagcctagaagttcaagaccaccctgggcaacatagcgaaaccccctttctacaaaaaatacaaaaactagctgggtgtggtggtgcacacctgtagtcccagctacttggaaggctgaaatgggaagactgcttgagcccgggagggagaagttgcagtaagccaggaccacaccactgcactccagcctgggcaacagagtgagactctgtctcaaacaaacaaataaatgaggcgggtggatcacgaggtcagtagatcgagaccatcctggctaacacggtgaaacccgtctctactaaaaaaaaaaaaaaatacaaaaaattagccaggcatggtggcgggcgcctgtagtcccagttactcgggaggctgaggcaggagaatggcgtgaaaccgggaggcagagcttgcagtgagccgagatcgcaccactgccctccagcctgggcgacagagcgagactccgtctcaatcaatcaatcaatcaataaaatctattaacaatatttattgtgcacttaacaggaacatgccctgtccaaaaaaaactttacagggcttaactcattttatccttaccacaatcctatgaagtaggaacttttataaaacgcattttataaacaaggcacagagaggttaattaacttgccctctggtcacacagctaggaagtgggcagagtacagatttacacaaggcatccgtctcctggccccacatacccaactgctgtaaacccataccggcggccaagcagcctcaatttgtgcatgcacccacttcccagcaagacagcagctcccaagttcctcctgtttagaattttagaagcggcgggccaccaggctgcagtctcccttgggtcaggggtcctggttgcactccgtgctttgcacaaagcaggctctccatttttgttaaatgcacgaatagtgctaagctgggaagttcttcctgaggtctaacctctagctgctcccccacagaagagtgcctgcggccagtggccaccaggggtcgccgcagcacccagcgctggagggcggagcgggcggcagacccggagcagcaagtggactctctcgagaagcttgaactgaaaaaccagaaagttaactggtaagtttagtctttttgtcttttatttcaggtcccggatccggtggtggtgcaaatcaaagaactgctcctcagtggatgttgcctttacttctaggcctgtacggaagtgttacttctgctctaaaagctgcggaattgtacccgcggccgatccaccggtatgtggactctcgggcgccgcgcagtagccggcctcctggcgtcacccagcccagcccaggcccagaccctcacccgggtcccgcggccggcagagttggccccactctgcggccgccgtggcctgcgcaccgacatcgatgcgacctgcacgccccgccgcgcaagttcgaaccaacgtggcctcaaccagatttggaatgtcaaaaagcagagtgtctatttgatgaatttgaggaaatctggaactttgggccacccaggctctctagatgagaccacctatgaaagactagcagaggaaacgctggactctttagcagagttttttgaagaccttgcagacaagccatacacgtttgaggactatgatgtctcctttgggagtggtgtcttaactgtcaaactgggtggagatctaggaacctatgtgatcaacaagcagacgccaaacaagcaaatctggctatcttctccatccagtggacctaagcgttatgactggactgggaaaaactgggtgtactcccacgacggcgtgtccctccatgagctgctggccgcagagctcactaaagccttaaaaaccaaactggacttgtcttccttggcctattccggaaaagatgcttgagcggccctagcgtttaaacgggccctctagagtcgacccgggcggcctcgaggacggggtgaactacgcctgaggatccgatctttttccctctgccaaaaattatggggacatcatgaagccccttgagcatctgacttctggctaataaaggaaatttattttcattgcaatagtgtgttggaattttttgtgtctctcactcggcctaggtagataagtagcatggcgggttaatcattaactacaaggaacccctagtgatggagttggccactccctctctgcgcgctcgctcgctcactgaggccgggcgaccaaaggtcgcccgacgcccgggctttgcccgggcggcctcagtgagcgagcgagcgcgcagccttaattaacctaattcactggccgtcgttttacaacgtcgtgactgggaaaaccctggcgttacccaacttaatcgccttgcagcacatccccctttcgccagctggcgtaatagcgaagaggcccgcaccgatcgcccttcccaacagttgcgcagcctgaatggcgaatgggacgcgccctgtagcggcgcattaagcgcggcgggtgtggtggttacgcgcagcgtgaccgctacacttgccagcgccctagcgcccgctcctttcgctttcttcccttcctttctcgccacgttcgccggctttccccgtcaagctctaaatcgggggctccctttagggttccgatttagtgctttacggcacctcgaccccaaaaaacttgattagggtgatggttcacgtagtgggccatcgccctgatagacggtttttcgccctttgacgttggagtccacgttctttaatagtggactcttgttccaaactggaacaacactcaaccctatctcggtctattcttttgatttataagggattttgccgatttcggcctattggttaaaaaatgagctgatttaacaaaaatttaacgcgaattttaacaaaatattaacgcttacaatttaggtggcacttttcggggaaatgtgcgcggaacccctatttgtttatttttctaaatacattcaaatatgtatccgctcatgagacaataaccctgataaatgcttcaataatattgaaaaaggaagagtatgagtattcaacatttccgtgtcgcccttattcccttttttgcggcattttgccttcctgtttttgctcacccagaaacgctggtgaaagtaaaagatgctgaagatcagttgggtgcacgagtgggttacatcgaactggatctcaacagcggtaagatccttgagagttttcgccccgaagaacgttttccaatgatgagcacttttaaagttctgctatgtggcgcggtattatcccgtattgacgccgggcaagagcaactcggtcgccgcatacactattctcagaatgacttggttgagtactcaccagtcacagaaaagcatcttacggatggcatgacagtaagagaattatgcagtgctgccataaccatgagtgataacactgcggccaacttacttctgacaacgatcggaggaccgaaggagctaaccgcttttttgcacaacatgggggatcatgtaactcgccttgatcgttgggaaccggagctgaatgaagccataccaaacgacgagcgtgacaccacgatgcctgtagcaatggcaacaacgttgcgcaaactattaactggcgaactacttactctagcttcccggcaacaattaatagactggatggaggcggataaagttgcaggaccacttctgcgctcggcccttccggctggctggtttattgctgataaatctggagccggtgagcgtgggtctcgcggtatcattgcagcactggggccagatggtaagccctcccgtatcgtagttatctacacgacggggagtcaggcaactatggatgaacgaaatagacagatcgctgagataggtgcctcactgattaagcattggtaactgtcagaccaagtttactcatatatactttagattgatttaaaacttcatttttaatttaaaaggatctaggtgaagatcctttttgataatctcatgaccaaaatcccttaacgtgagttttcgttccactgagcgtcagaccccgtagaaaagatcaaaggatcttcttgagatcctttttttctgcgcgtaatctgctgcttgcaaacaaaaaaaccaccgctaccagcggtggtttgtttgccggatcaagagctaccaactctttttccgaaggtaactggcttcagcagagcgcagataccaaatactgttcttctagtgtagccgtagttaggccaccacttcaagaactctgtagcaccgcctacatacctcgctctgctaatcctgttaccagtggctgctgccagtggcgataagtcgtgtcttaccgggttggactcaagacgatagttaccggataaggcgcagcggtcgggctgaacggggggttcgtgcacacagcccagcttggagcgaacgacctacaccgaactgagatacctacagcgtgagctatgagaaagcgccacgcttcccgaagggagaaaggcggacaggtatccggtaagcggcagggtcggaacaggagagcgcacgagggagcttccagggggaaacgcctggtatctttatagtcctgtcgggtttcgccacctctgacttgagcgtcgatttttgtgatgctcgtcaggggggcggagcctatggaaaaacgccagcaacgcggcctttttacggttcctggccttttgctggccttttgctcacatgttctttcctgcgttatcccctgattctgtggataaccgtattaccgcctttgagtgagctgataccgctcgccgcagccgaacgaccgagcgcagcgagtcagtgagcgaggaagcggaagagcgcccaatacgcaaaccgcctctccccgcgcgttggccgattcattaatgcagctggcacgacaggtttcccgactggaaagcgggcagtgagcgcaacgcaattaatgtgagttagctcactcattaggcaccccaggctttacactttatgcttccggctcgtatgttgtgtggaattgtgagcggataa

SEQ ID NO: 649 - DNA, 5487 bp, Artificial Sequence
  Description of Artificial Sequence: Synthetic polynucleotide
caatttcacacaggaaacagctatgaccatgattacgccagatttaattaaggccttaattaggctgcgcgctcgctcgctcactgaggccgcccgggcaaagcccgggcgtcgggcgacctttggtcgcccggcctcagtgagcgagcgagcgcgcagagagggagtgtagccatgctctaggaagatcaattcaattcacgcgtactatagctagagctcccaggctcaagtgatcctcccgcctcagcctcctgagtagctgagatcacaggcatgcactaccacactcggctcacatttgacatcctctaaagcatatataaaatgtgaagaaaactttcacaatttgcatccctttgtaatatgtaacagaaataaaattctcttttaaaatctatcaacaataggcaaggcacggtggctcacgcctgtcgtctcagcactttgtgaggcccaggcgggcagatcgtttgagcctagaagttcaagaccaccctgggcaacatagcgaaaccccctttctacaaaaaatacaaaaactagctgggtgtggtggtgcacacctgtagtcccagctacttggaaggctgaaatgggaagactgcttgagcccgggagggagaagttgcagtaagccaggaccacaccactgcactccagcctgggcaacagagtgagactctgtctcaaacaaacaaataaatgaggcgggtggatcacgaggtcagtagatcgagaccatcctggctaacacggtgaaacccgtctctactaaaaaaaaaaaaaaatacaaaaaattagccaggcatggtggcgggcgcctgtagtcccagttactcgggaggctgaggcaggagaatggcgtgaaaccgggaggcagagcttgcagtgagccgagatcgcaccactgccctccagcctgggcgacagagcgagactccgtctcaatcaatcaatcaatcaataaaatctattaacaatatttattgtgcacttaacaggaacatgccctgtccaaaaaaaactttacagggcttaactcattttatccttaccacaatcctatgaagtaggaacttttataaaacgcattttataaacaaggcacagagaggttaattaacttgccctctggtcacacagctaggaagtgggcagagtacagatttacacaaggcatccgtctcctggccccacatacccaactgctgtaaacccataccggcggccaagcagcctcaatttgtgcatgcacccacttcccagcaagacagcagctcccaagttcctcctgtttagaattttagaagcggcgggccaccaggctgcagtctcccttgggtcaggggtcctggttgcactccgtgctttgcacaaagcaggctctccatttttgttaaatgcacgaatagtgctaagctgggaagttcttcctgaggtctaacctctagctgctcccccacagaagagtgcctgcggccagtggccaccaggggtcgccgcagcacccagcgctggagggcggagcgggcggcagacccggagcagcaagtggactctctcgagaagcttgaactgaaaaaccagaaagttaactggtaagtttagtctttttgtcttttatttcaggtcccggatccggtggtggtgcaaatcaaagaactgctcctcagtggatgttgcctttacttctaggcctgtacggaagtgttacttctgctctaaaagctgcggaattgtacccgcggccgatccaccggtatgtggacactcgggcgacgcgccgtggctgggctgcttgcttccccaagtcccgcacaggcgcaaaccctcacaagggtcccacggccagctgaattggccccgctgtgcggtcggaggggcctgcgaacagatatagacgcaacgtgcacccccagaagagcaagcagcaaccagagaggcctcaatcagatttggaacgtcaagaaacagagtgtctatctgatgaacctccgcaaatcagggacccttggtcatccgggatctcttgatgaaacgacctatgaacggctggctgaggagacgcttgactccctggcagagttcttcgaggatctggctgataagccatacacgttcgaggactatgatgtttcttttggttctggcgtcctgacggtgaaactcggaggggatctgggcacttacgttatcaacaaacagactcccaataaacagatttggttgtctagtcctagcagtggcccaaaacgctatgactggacgggcaagaactgggtgtactcccacgatggagttagcctgcacgaacttctggccgctgagcttactaaagcgctgaagactaagctggatctctccagcctcgcatacagcggcaaagacgcctagctcgaggacggggtgaactacgcctgaggatccgatctttttccctctgccaaaaattatggggacatcatgaagccccttgagcatctgacttctggctaataaaggaaatttattttcattgcaatagtgtgttggaattttttgtgtctctcactcggcctaggtagataagtagcatggcgggttaatcattaactacaaggaacccctagtgatggagttggccactccctctctgcgcgctcgctcgctcactgaggccgggcgaccaaaggtcgcccgacgcccgggctttgcccgggcggcctcagtgagcgagcgagcgcgcagccttaattaacctaattcactggccgtcgttttacaacgtcgtgactgggaaaaccctggcgttacccaacttaatcgccttgcagcacatccccctttcgccagctggcgtaatagcgaagaggcccgcaccgatcgcccttcccaacagttgcgcagcctgaatggcgaatgggacgcgccctgtagcggcgcattaagcgcggcgggtgtggtggttacgcgcagcgtgaccgctacacttgccagcgccctagcgcccgctcctttcgctttcttcccttcctttctcgccacgttcgccggctttccccgtcaagctctaaatcgggggctccctttagggttccgatttagtgctttacggcacctcgaccccaaaaaacttgattagggtgatggttcacgtagtgggccatcgccctgatagacggtttttcgccctttgacgttggagtccacgttctttaatagtggactcttgttccaaactggaacaacactcaaccctatctcggtctattcttttgatttataagggattttgccgatttcggcctattggttaaaaaatgagctgatttaacaaaaatttaacgcgaattttaacaaaatattaacgcttacaatttaggtggcacttttcggggaaatgtgcgcggaacccctatttgtttatttttctaaatacattcaaatatgtatccgctcatgagacaataaccctgataaatgcttcaataatattgaaaaaggaagagtatgagtattcaacatttccgtgtcgcccttattcccttttttgcggcattttgccttcctgtttttgctcacccagaaacgctggtgaaagtaaaagatgctgaagatcagttgggtgcacgagtgggttacatcgaactggatctcaacagcggtaagatccttgagagttttcgccccgaagaacgttttccaatgatgagcacttttaaagttctgctatgtggcgcggtattatcccgtattgacgccgggcaagagcaactcggtcgccgcatacactattctcagaatgacttggttgagtactcaccagtcacagaaaagcatcttacggatggcatgacagtaagagaattatgcagtgctgccataaccatgagtgataacactgcggccaacttacttctgacaacgatcggaggaccgaaggagctaaccgcttttttgcacaacatgggggatcatgtaactcgccttgatcgttgggaaccggagctgaatgaagccataccaaacgacgagcgtgacaccacgatgcctgtagcaatggcaacaacgttgcgcaaactattaactggcgaactacttactctagcttcccggcaacaattaatagactggatggaggcggataaagttgcaggaccacttctgcgctcggcccttccggctggctggtttattgctgataaatctggagccggtgagcgtgggtctcgcggtatcattgcagcactggggccagatggtaagccctcccgtatcgtagttatctacacgacggggagtcaggcaactatggatgaacgaaatagacagatcgctgagataggtgcctcactgattaagcattggtaactgtcagaccaagtttactcatatatactttagattgatttaaaacttcatttttaatttaaaaggatctaggtgaagatcctttttgataatctcatgaccaaaatcccttaacgtgagttttcgttccactgagcgtcagaccccgtagaaaagatcaaaggatcttcttgagatcctttttttctgcgcgtaatctgctgcttgcaaacaaaaaaaccaccgctaccagcggtggtttgtttgccggatcaagagctaccaactctttttccgaaggtaactggcttcagcagagcgcagataccaaatactgttcttctagtgtagccgtagttaggccaccacttcaagaactctgtagcaccgcctacatacctcgctctgctaatcctgttaccagtggctgctgccagtggcgataagtcgtgtcttaccgggttggactcaagacgatagttaccggataaggcgcagcggtcgggctgaacggggggttcgtgcacacagcccagcttggagcgaacgacctacaccgaactgagatacctacagcgtgagctatgagaaagcgccacgcttcccgaagggagaaaggcggacaggtatccggtaagcggcagggtcggaacaggagagcgcacgagggagcttccagggggaaacgcctggtatctttatagtcctgtcgggtttcgccacctctgacttgagcgtcgatttttgtgatgctcgtcaggggggcggagcctatggaaaaacgccagcaacgcggcctttttacggttcctggccttttgctggccttttgctcacatgttctttcctgcgttatcccctgattctgtggataaccgtattaccgcctttgagtgagctgataccgctcgccgcagccgaacgaccgagcgcagcgagtcagtgagcgaggaagcggaagagcgcccaatacgcaaaccgcctctccccgcgcgttggccgattcattaatgcagctggcacgacaggtttcccgactggaaagcgggcagtgagcgcaacgcaattaatgtgagttagctcactcattaggcaccccaggctttacactttatgcttccggctcgtatgttgtgtggaattgtgagcggataa

SEQ ID NO: 650 - DNA, 5487 bp, Artificial Sequence
  Description of Artificial Sequence: Synthetic polynucleotide
caatttcacacaggaaacagctatgaccatgattacgccagatttaattaaggccttaattaggctgcgcgctcgctcgctcactgaggccgcccgggcaaagcccgggcgtcgggcgacctttggtcgcccggcctcagtgagcgagcgagcgcgcagagagggagtgtagccatgctctaggaagatcaattcaattcacgcgtactatagctagagctcccaggctcaagtgatcctcccgcctcagcctcctgagtagctgagatcacaggcatgcactaccacactcggctcacatttgacatcctctaaagcatatataaaatgtgaagaaaactttcacaatttgcatccctttgtaatatgtaacagaaataaaattctcttttaaaatctatcaacaataggcaaggcacggtggctcacgcctgtcgtctcagcactttgtgaggcccaggcgggcagatcgtttgagcctagaagttcaagaccaccctgggcaacatagcgaaaccccctttctacaaaaaatacaaaaactagctgggtgtggtggtgcacacctgtagtcccagctacttggaaggctgaaatgggaagactgcttgagcccgggagggagaagttgcagtaagccaggaccacaccactgcactccagcctgggcaacagagtgagactctgtctcaaacaaacaaataaatgaggcgggtggatcacgaggtcagtagatcgagaccatcctggctaacacggtgaaacccgtctctactaaaaaaaaaaaaaaatacaaaaaattagccaggcatggtggcgggcgcctgtagtcccagttactcgggaggctgaggcaggagaatggcgtgaaaccgggaggcagagcttgcagtgagccgagatcgcaccactgccctccagcctgggcgacagagcgagactccgtctcaatcaatcaatcaatcaataaaatctattaacaatatttattgtgcacttaacaggaacatgccctgtccaaaaaaaactttacagggcttaactcattttatccttaccacaatcctatgaagtaggaacttttataaaacgcattttataaacaaggcacagagaggttaattaacttgccctctggtcacacagctaggaagtgggcagagtacagatttacacaaggcatccgtctcctggccccacatacccaactgctgtaaacccataccggcggccaagcagcctcaatttgtgcatgcacccacttcccagcaagacagcagctcccaagttcctcctgtttagaattttagaagcggcgggccaccaggctgcagtctcccttgggtcaggggtcctggttgcactccgtgctttgcacaaagcaggctctccatttttgttaaatgcacgaatagtgctaagctgggaagttcttcctgaggtctaacctctagctgctcccccacagaagagtgcctgcggccagtggccaccaggggtcgccgcagcacccagcgctggagggcggagcgggcggcagacccggagcagcaagtggactctctcgagaagcttgaactgaaaaaccagaaagttaactggtaagtttagtctttttgtcttttatttcaggtcccggatccggtggtggtgcaaatcaaagaactgctcctcagtggatgttgcctttacttctaggcctgtacggaagtgttacttctgctctaaaagctgcggaattgtacccgcggccgatccaccggtatgtggactctgggtcgacgcgccgtagccggtctcttggcctccccatcccctgcgcaggcacagacccttacacgagttccacggcccgctgaactggcaccactctgcggacgccggggcctgagaaccgatattgacgctacgtgcactccccgacgagcctcttctaatcagagggggctcaaccagatctggaacgtgaagaagcagtcagtctacttgatgaatctgagaaagagcgggacccttgggcaccccgggtctctcgacgagactacatacgagaggctggccgaggagactttggactctctcgccgaattcttcgaggatttggcagacaagccgtacacctttgaagactacgatgtctcattcggatcaggggtgctgacggttaaactggggggcgatctcggaacctacgtcataaacaaacagacacccaataagcagatctggttgtctagcccatcatccggtcctaaacggtacgactggaccggcaagaactgggtctactcccatgacggagtcagtcttcatgaactgcttgccgcagagctgaccaaggctcttaagacgaaactggatctctctagcctggcctactccgggaaggatgcatagctcgaggacggggtgaactacgcctgaggatccgatctttttccctctgccaaaaattatggggacatcatgaagccccttgagcatctgacttctggctaataaaggaaatttattttcattgcaatagtgtgttggaattttttgtgtctctcactcggcctaggtagataagtagcatggcgggttaatcattaactacaaggaacccctagtgatggagttggccactccctctctgcgcgctcgctcgctcactgaggccgggcgaccaaaggtcgcccgacgcccgggctttgcccgggcggcctcagtgagcgagcgagcgcgcagccttaattaacctaattcactggccgtcgttttacaacgtcgtgactgggaaaaccctggcgttacccaacttaatcgccttgcagcacatccccctttcgccagctggcgtaatagcgaagaggcccgcaccgatcgcccttcccaacagttgcgcagcctgaatggcgaatgggacgcgccctgtagcggcgcattaagcgcggcgggtgtggtggttacgcgcagcgtgaccgctacacttgccagcgccctagcgcccgctcctttcgctttcttcccttcctttctcgccacgttcgccggctttccccgtcaagctctaaatcgggggctccctttagggttccgatttagtgctttacggcacctcgaccccaaaaaacttgattagggtgatggttcacgtagtgggccatcgccctgatagacggtttttcgccctttgacgttggagtccacgttctttaatagtggactcttgttccaaactggaacaacactcaaccctatctcggtctattcttttgatttataagggattttgccgatttcggcctattggttaaaaaatgagctgatttaacaaaaatttaacgcgaattttaacaaaatattaacgcttacaatttaggtggcacttttcggggaaatgtgcgcggaacccctatttgtttatttttctaaatacattcaaatatgtatccgctcatgagacaataaccctgataaatgcttcaataatattgaaaaaggaagagtatgagtattcaacatttccgtgtcgcccttattcccttttttgcggcattttgccttcctgtttttgctcacccagaaacgctggtgaaagtaaaagatgctgaagatcagttgggtgcacgagtgggttacatcgaactggatctcaacagcggtaagatccttgagagttttcgccccgaagaacgttttccaatgatgagcacttttaaagttctgctatgtggcgcggtattatcccgtattgacgccgggcaagagcaactcggtcgccgcatacactattctcagaatgacttggttgagtactcaccagtcacagaaaagcatcttacggatggcatgacagtaagagaattatgcagtgctgccataaccatgagtgataacactgcggccaacttacttctgacaacgatcggaggaccgaaggagctaaccgcttttttgcacaacatgggggatcatgtaactcgccttgatcgttgggaaccggagctgaatgaagccataccaaacgacgagcgtgacaccacgatgcctgtagcaatggcaacaacgttgcgcaaactattaactggcgaactacttactctagcttcccggcaacaattaatagactggatggaggcggataaagttgcaggaccacttctgcgctcggcccttccggctggctggtttattgctgataaatctggagccggtgagcgtgggtctcgcggtatcattgcagcactggggccagatggtaagccctcccgtatcgtagttatctacacgacggggagtcaggcaactatggatgaacgaaatagacagatcgctgagataggtgcctcactgattaagcattggtaactgtcagaccaagtttactcatatatactttagattgatttaaaacttcatttttaatttaaaaggatctaggtgaagatcctttttgataatctcatgaccaaaatcccttaacgtgagttttcgttccactgagcgtcagaccccgtagaaaagatcaaaggatcttcttgagatcctttttttctgcgcgtaatctgctgcttgcaaacaaaaaaaccaccgctaccagcggtggtttgtttgccggatcaagagctaccaactctttttccgaaggtaactggcttcagcagagcgcagataccaaatactgttcttctagtgtagccgtagttaggccaccacttcaagaactctgtagcaccgcctacatacctcgctctgctaatcctgttaccagtggctgctgccagtggcgataagtcgtgtcttaccgggttggactcaagacgatagttaccggataaggcgcagcggtcgggctgaacggggggttcgtgcacacagcccagcttggagcgaacgacctacaccgaactgagatacctacagcgtgagctatgagaaagcgccacgcttcccgaagggagaaaggcggacaggtatccggtaagcggcagggtcggaacaggagagcgcacgagggagcttccagggggaaacgcctggtatctttatagtcctgtcgggtttcgccacctctgacttgagcgtcgatttttgtgatgctcgtcaggggggcggagcctatggaaaaacgccagcaacgcggcctttttacggttcctggccttttgctggccttttgctcacatgttctttcctgcgttatcccctgattctgtggataaccgtattaccgcctttgagtgagctgataccgctcgccgcagccgaacgaccgagcgcagcgagtcagtgagcgaggaagcggaagagcgcccaatacgcaaaccgcctctccccgcgcgttggccgattcattaatgcagctggcacgacaggtttcccgactggaaagcgggcagtgagcgcaacgcaattaatgtgagttagctcactcattaggcaccccaggctttacactttatgcttccggctcgtatgttgtgtggaattgtgagcggataa

SEQ ID NO: 651 - DNA, 5487 bp, Artificial Sequence
  Description of Artificial Sequence: Synthetic polynucleotide
caatttcacacaggaaacagctatgaccatgattacgccagatttaattaaggccttaattaggctgcgcgctcgctcgctcactgaggccgcccgggcaaagcccgggcgtcgggcgacctttggtcgcccggcctcagtgagcgagcgagcgcgcagagagggagtgtagccatgctctaggaagatcaattcaattcacgcgtactatagctagagctcccaggctcaagtgatcctcccgcctcagcctcctgagtagctgagatcacaggcatgcactaccacactcggctcacatttgacatcctctaaagcatatataaaatgtgaagaaaactttcacaatttgcatccctttgtaatatgtaacagaaataaaattctcttttaaaatctatcaacaataggcaaggcacggtggctcacgcctgtcgtctcagcactttgtgaggcccaggcgggcagatcgtttgagcctagaagttcaagaccaccctgggcaacatagcgaaaccccctttctacaaaaaatacaaaaactagctgggtgtggtggtgcacacctgtagtcccagctacttggaaggctgaaatgggaagactgcttgagcccgggagggagaagttgcagtaagccaggaccacaccactgcactccagcctgggcaacagagtgagactctgtctcaaacaaacaaataaatgaggcgggtggatcacgaggtcagtagatcgagaccatcctggctaacacggtgaaacccgtctctactaaaaaaaaaaaaaaatacaaaaaattagccaggcatggtggcgggcgcctgtagtcccagttactcgggaggctgaggcaggagaatggcgtgaaaccgggaggcagagcttgcagtgagccgagatcgcaccactgccctccagcctgggcgacagagcgagactccgtctcaatcaatcaatcaatcaataaaatctattaacaatatttattgtgcacttaacaggaacatgccctgtccaaaaaaaactttacagggcttaactcattttatccttaccacaatcctatgaagtaggaacttttataaaacgcattttataaacaaggcacagagaggttaattaacttgccctctggtcacacagctaggaagtgggcagagtacagatttacacaaggcatccgtctcctggccccacatacccaactgctgtaaacccataccggcggccaagcagcctcaatttgtgcatgcacccacttcccagcaagacagcagctcccaagttcctcctgtttagaattttagaagcggcgggccaccaggctgcagtctcccttgggtcaggggtcctggttgcactccgtgctttgcacaaagcaggctctccatttttgttaaatgcacgaatagtgctaagctgggaagttcttcctgaggtctaacctctagctgctcccccacagaagagtgcctgcggccagtggccaccaggggtcgccgcagcacccagcgctggagggcggagcgggcggcagacccggagcagcaagtggactctctcgagaagcttgaactgaaaaaccagaaagttaactggtaagtttagtctttttgtcttttatttcaggtcccggatccggtggtggtgcaaatcaaagaactgctcctcagtggatgttgcctttacttctaggcctgtacggaagtgttacttctgctctaaaagctgcggaattgtacccgcggccgatccaccggtatgtggactctcgggcgacgcgccgtagccggtctcctggcttccccaagccctgcacaggcacagaccctcacacgggtcccacggccagctgaattggccccactctgcggtcgccggggcctgcgaaccgatatagacgcaacgtgcactccccgacgagcaagttccaaccagagagggctcaaccagatttggaacgtcaagaagcagagtgtctatttgatgaatctgagaaaatccgggacccttgggcaccccggatctcttgatgaaactacctatgaaaggctggccgaggagacgctggactctctggcagagttcttcgaggatctggcagacaagccatacacgtttgaggactatgatgtctcttttggatctggcgtcctgacggttaaactgggaggggatctcggaacctacgttatcaacaaacagactcccaataagcagatctggttgtctagtccatccagtggtcctaaacgctatgactggacgggcaagaactgggtgtactcccacgacggagttagccttcatgaactgctggccgcagagctgactaaagctcttaagactaaactggatctctctagcctggcctactccgggaaagatgcctagctcgaggacggggtgaactacgcctgaggatccgatctttttccctctgccaaaaattatggggacatcatgaagccccttgagcatctgacttctggctaataaaggaaatttattttcattgcaatagtgtgttggaattttttgtgtctctcactcggcctaggtagataagtagcatggcgggttaatcattaactacaaggaacccctagtgatggagttggccactccctctctgcgcgctcgctcgctcactgaggccgggcgaccaaaggtcgcccgacgcccgggctttgcccgggcggcctcagtgagcgagcgagcgcgcagccttaattaacctaattcactggccgtcgttttacaacgtcgtgactgggaaaaccctggcgttacccaacttaatcgccttgcagcacatccccctttcgccagctggcgtaatagcgaagaggcccgcaccgatcgcccttcccaacagttgcgcagcctgaatggcgaatgggacgcgccctgtagcggcgcattaagcgcggcgggtgtggtggttacgcgcagcgtgaccgctacacttgccagcgccctagcgcccgctcctttcgctttcttcccttcctttctcgccacgttcgccggctttccccgtcaagctctaaatcgggggctccctttagggttccgatttagtgctttacggcacctcgaccccaaaaaacttgattagggtgatggttcacgtagtgggccatcgccctgatagacggtttttcgccctttgacgttggagtccacgttctttaatagtggactcttgttccaaactggaacaacactcaaccctatctcggtctattcttttgatttataagggattttgccgatttcggcctattggttaaaaaatgagctgatttaacaaaaatttaacgcgaattttaacaaaatattaacgcttacaatttaggtggcacttttcggggaaatgtgcgcggaacccctatttgtttatttttctaaatacattcaaatatgtatccgctcatgagacaataaccctgataaatgcttcaataatattgaaaaaggaagagtatgagtattcaacatttccgtgtcgcccttattcccttttttgcggcattttgccttcctgtttttgctcacccagaaacgctggtgaaagtaaaagatgctgaagatcagttgggtgcacgagtgggttacatcgaactggatctcaacagcggtaagatccttgagagttttcgccccgaagaacgttttccaatgatgagcacttttaaagttctgctatgtggcgcggtattatcccgtattgacgccgggcaagagcaactcggtcgccgcatacactattctcagaatgacttggttgagtactcaccagtcacagaaaagcatcttacggatggcatgacagtaagagaattatgcagtgctgccataaccatgagtgataacactgcggccaacttacttctgacaacgatcggaggaccgaaggagctaaccgcttttttgcacaacatgggggatcatgtaactcgccttgatcgttgggaaccggagctgaatgaagccataccaaacgacgagcgtgacaccacgatgcctgtagcaatggcaacaacgttgcgcaaactattaactggcgaactacttactctagcttcccggcaacaattaatagactggatggaggcggataaagttgcaggaccacttctgcgctcggcccttccggctggctggtttattgctgataaatctggagccggtgagcgtgggtctcgcggtatcattgcagcactggggccagatggtaagccctcccgtatcgtagttatctacacgacggggagtcaggcaactatggatgaacgaaatagacagatcgctgagataggtgcctcactgattaagcattggtaactgtcagaccaagtttactcatatatactttagattgatttaaaacttcatttttaatttaaaaggatctaggtgaagatcctttttgataatctcatgaccaaaatcccttaacgtgagttttcgttccactgagcgtcagaccccgtagaaaagatcaaaggatcttcttgagatcctttttttctgcgcgtaatctgctgcttgcaaacaaaaaaaccaccgctaccagcggtggtttgtttgccggatcaagagctaccaactctttttccgaaggtaactggcttcagcagagcgcagataccaaatactgttcttctagtgtagccgtagttaggccaccacttcaagaactctgtagcaccgcctacatacctcgctctgctaatcctgttaccagtggctgctgccagtggcgataagtcgtgtcttaccgggttggactcaagacgatagttaccggataaggcgcagcggtcgggctgaacggggggttcgtgcacacagcccagcttggagcgaacgacctacaccgaactgagatacctacagcgtgagctatgagaaagcgccacgcttcccgaagggagaaaggcggacaggtatccggtaagcggcagggtcggaacaggagagcgcacgagggagcttccagggggaaacgcctggtatctttatagtcctgtcgggtttcgccacctctgacttgagcgtcgatttttgtgatgctcgtcaggggggcggagcctatggaaaaacgccagcaacgcggcctttttacggttcctggccttttgctggccttttgctcacatgttctttcctgcgttatcccctgattctgtggataaccgtattaccgcctttgagtgagctgataccgctcgccgcagccgaacgaccgagcgcagcgagtcagtgagcgaggaagcggaagagcgcccaatacgcaaaccgcctctccccgcgcgttggccgattcattaatgcagctggcacgacaggtttcccgactggaaagcgggcagtgagcgcaacgcaattaatgtgagttagctcactcattaggcaccccaggctttacactttatgcttccggctcgtatgttgtgtggaattgtgagcggataa

SEQ ID NO: 652 - DNA, 5487 bp, Artificial Sequence
  Description of Artificial Sequence: Synthetic polynucleotide
caatttcacacaggaaacagctatgaccatgattacgccagatttaattaaggccttaattaggctgcgcgctcgctcgctcactgaggccgcccgggcaaagcccgggcgtcgggcgacctttggtcgcccggcctcagtgagcgagcgagcgcgcagagagggagtgtagccatgctctaggaagatcaattcaattcacgcgtactatagctagagctcccaggctcaagtgatcctcccgcctcagcctcctgagtagctgagatcacaggcatgcactaccacactcggctcacatttgacatcctctaaagcatatataaaatgtgaagaaaactttcacaatttgcatccctttgtaatatgtaacagaaataaaattctcttttaaaatctatcaacaataggcaaggcacggtggctcacgcctgtcgtctcagcactttgtgaggcccaggcgggcagatcgtttgagcctagaagttcaagaccaccctgggcaacatagcgaaaccccctttctacaaaaaatacaaaaactagctgggtgtggtggtgcacacctgtagtcccagctacttggaaggctgaaatgggaagactgcttgagcccgggagggagaagttgcagtaagccaggaccacaccactgcactccagcctgggcaacagagtgagactctgtctcaaacaaacaaataaatgaggcgggtggatcacgaggtcagtagatcgagaccatcctggctaacacggtgaaacccgtctctactaaaaaaaaaaaaaaatacaaaaaattagccaggcatggtggcgggcgcctgtagtcccagttactcgggaggctgaggcaggagaatggcgtgaaaccgggaggcagagcttgcagtgagccgagatcgcaccactgccctccagcctgggcgacagagcgagactccgtctcaatcaatcaatcaatcaataaaatctattaacaatatttattgtgcacttaacaggaacatgccctgtccaaaaaaaactttacagggcttaactcattttatccttaccacaatcctatgaagtaggaacttttataaaacgcattttataaacaaggcacagagaggttaattaacttgccctctggtcacacagctaggaagtgggcagagtacagatttacacaaggcatccgtctcctggccccacatacccaactgctgtaaacccataccggcggccaagcagcctcaatttgtgcatgcacccacttcccagcaagacagcagctcccaagttcctcctgtttagaattttagaagcggcgggccaccaggctgcagtctcccttgggtcaggggtcctggttgcactccgtgctttgcacaaagcaggctctccatttttgttaaatgcacgaatagtgctaagctgggaagttcttcctgaggtctaacctctagctgctcccccacagaagagtgcctgcggccagtggccaccaggggtcgccgcagcacccagcgctggagggcggagcgggcggcagacccggagcagcaagtggactctctcgagaagcttgaactgaaaaaccagaaagttaactggtaagtttagtctttttgtcttttatttcaggtcccggatccggtggtggtgcaaatcaaagaactgctcctcagtggatgttgcctttacttctaggcctgtacggaagtgttacttctgctctaaaagctgcggaattgtacccgcggccgatccaccggtatgtggactctggggcgacgcgccgtggccgggctcctggcatccccatcccctgcgcaggcgcaaaccctcacacgggttccacggccagctgaactggccccactgtgcggccggcggggcctgagaacagatattgacgcaacgtgcactcccagaagagccagcagcaaccagagggggttgaatcagatctggaacgtcaagaagcagtcagtgtacctgatgaatctccgaaaaagcgggacccttggtcaccccggatctctcgatgaaaccacatatgaacggctggccgaggaaacgctggactccctggccgagttcttcgaggacctggcagacaagccgtacaccttcgaagactatgatgtttcattcggaagtggcgtgctgacggtcaaactgggaggcgatctgggaacctacgttataaacaaacagactcccaataaacagatctggttgtctagtccatccagcggtcctaaacgctatgactggacgggcaagaactgggtctactcccacgacggagttagccttcacgaactgttggccgcagagctgacaaaggcgcttaagacgaaactggatctctctagcctggcctactccggcaaagatgcctagctcgaggacggggtgaactacgcctgaggatccgatctttttccctctgccaaaaattatggggacatcatgaagccccttgagcatctgacttctggctaataaaggaaatttattttcattgcaatagtgtgttggaattttttgtgtctctcactcggcctaggtagataagtagcatggcgggttaatcattaactacaaggaacccctagtgatggagttggccactccctctctgcgcgctcgctcgctcactgaggccgggcgaccaaaggtcgcccgacgcccgggctttgcccgggcggcctcagtgagcgagcgagcgcgcagccttaattaacctaattcactggccgtcgttttacaacgtcgtgactgggaaaaccctggcgttacccaacttaatcgccttgcagcacatccccctttcgccagctggcgtaatagcgaagaggcccgcaccgatcgcccttcccaacagttgcgcagcctgaatggcgaatgggacgcgccctgtagcggcgcattaagcgcggcgggtgtggtggttacgcgcagcgtgaccgctacacttgccagcgccctagcgcccgctcctttcgctttcttcccttcctttctcgccacgttcgccggctttccccgtcaagctctaaatcgggggctccctttagggttccgatttagtgctttacggcacctcgaccccaaaaaacttgattagggtgatggttcacgtagtgggccatcgccctgatagacggtttttcgccctttgacgttggagtccacgttctttaatagtggactcttgttccaaactggaacaacactcaaccctatctcggtctattcttttgatttataagggattttgccgatttcggcctattggttaaaaaatgagctgatttaacaaaaatttaacgcgaattttaacaaaatattaacgcttacaatttaggtggcacttttcggggaaatgtgcgcggaacccctatttgtttatttttctaaatacattcaaatatgtatccgctcatgagacaataaccctgataaatgcttcaataatattgaaaaaggaagagtatgagtattcaacatttccgtgtcgcccttattcccttttttgcggcattttgccttcctgtttttgctcacccagaaacgctggtgaaagtaaaagatgctgaagatcagttgggtgcacgagtgggttacatcgaactggatctcaacagcggtaagatccttgagagttttcgccccgaagaacgttttccaatgatgagcacttttaaagttctgctatgtggcgcggtattatcccgtattgacgccgggcaagagcaactcggtcgccgcatacactattctcagaatgacttggttgagtactcaccagtcacagaaaagcatcttacggatggcatgacagtaagagaattatgcagtgctgccataaccatgagtgataacactgcggccaacttacttctgacaacgatcggaggaccgaaggagctaaccgcttttttgcacaacatgggggatcatgtaactcgccttgatcgttgggaaccggagctgaatgaagccataccaaacgacgagcgtgacaccacgatgcctgtagcaatggcaacaacgttgcgcaaactattaactggcgaactacttactctagcttcccggcaacaattaatagactggatggaggcggataaagttgcaggaccacttctgcgctcggcccttccggctggctggtttattgctgataaatctggagccggtgagcgtgggtctcgcggtatcattgcagcactggggccagatggtaagccctcccgtatcgtagttatctacacgacggggagtcaggcaactatggatgaacgaaatagacagatcgctgagataggtgcctcactgattaagcattggtaactgtcagaccaagtttactcatatatactttagattgatttaaaacttcatttttaatttaaaaggatctaggtgaagatcctttttgataatctcatgaccaaaatcccttaacgtgagttttcgttccactgagcgtcagaccccgtagaaaagatcaaaggatcttcttgagatcctttttttctgcgcgtaatctgctgcttgcaaacaaaaaaaccaccgctaccagcggtggtttgtttgccggatcaagagctaccaactctttttccgaaggtaactggcttcagcagagcgcagataccaaatactgttcttctagtgtagccgtagttaggccaccacttcaagaactctgtagcaccgcctacatacctcgctctgctaatcctgttaccagtggctgctgccagtggcgataagtcgtgtcttaccgggttggactcaagacgatagttaccggataaggcgcagcggtcgggctgaacggggggttcgtgcacacagcccagcttggagcgaacgacctacaccgaactgagatacctacagcgtgagctatgagaaagcgccacgcttcccgaagggagaaaggcggacaggtatccggtaagcggcagggtcggaacaggagagcgcacgagggagcttccagggggaaacgcctggtatctttatagtcctgtcgggtttcgccacctctgacttgagcgtcgatttttgtgatgctcgtcaggggggcggagcctatggaaaaacgccagcaacgcggcctttttacggttcctggccttttgctggccttttgctcacatgttctttcctgcgttatcccctgattctgtggataaccgtattaccgcctttgagtgagctgataccgctcgccgcagccgaacgaccgagcgcagcgagtcagtgagcgaggaagcggaagagcgcccaatacgcaaaccgcctctccccgcgcgttggccgattcattaatgcagctggcacgacaggtttcccgactggaaagcgggcagtgagcgcaacgcaattaatgtgagttagctcactcattaggcaccccaggctttacactttatgcttccggctcgtatgttgtgtggaattgtgagcggataa

SEQ ID NO: 653 - DNA, 6391 bp, Artificial Sequence
  Description of Artificial Sequence: Synthetic polynucleotide
caatttcacacaggaaacagctatgaccatgattacgccagatttaattaaggccttaattaggctgcgcgctcgctcgctcactgaggccgcccgggcaaagcccgggcgtcgggcgacctttggtcgcccggcctcagtgagcgagcgagcgcgcagagagggagtgtagccatgctctaggaagatcaattcaattcacgcgtcccacctccctctctgtgctgggactcacagagggagacctcaggaggcagtctgtccatcacatgtccaaatgcagagcataccctgggctgggcgcagtggcgcacaactgtaattccagcactttgggaggctgatgtggaaggatcacttgagcccagaagttctagaccagcctgggcaacatggcaagaccctatctctacaaaaaaagttaaaaaatcagccacgtgtggtgacacacacctgtagtcccagctattcaggaggctgaggtgaggggatcacttaaggctgggaggttgaggctgcagtgagtcgtggttgcgccactgcactccagcctgggcaacagtgagaccctgtctcaaaagacaaaaaaaaaaaaaaaaaaaaaaagaacatatcctggtgtggagtaggggacgctgctctgacagaggctcgggggcctgagctggctctgtgagctggggaggaggcagacagccaggccttgtctgcaagcagacctggcagcattgggctggccgccccccagggcctcctcttcatgcccagtgaatgactcaccttggcacagacacaatgttcggggtgggcacagtgcctgcttcccgccgcaccccagcccccctcaaatgccttccgagaagcccattgagcagggggcttgcattgcaccccagcctgacagcctggcatcttgggataaaagcagcacagccccctaggggctgcccttgctgtgtggcgccaccggcggtggagaacaaggctctattcagcctgtgcccaggaaaggggatcaggggatgcccaggcatggacagtgggtggcagggggggagaggagggctgtctgcttcccagaagtccaaggacacaaatgggtgaggggactgggcagggttctgaccctgtgggaccagagtggagggcgtagatggacctgaagtctccagggacaacagggcccaggtctcaggctcctagttgggcccagtggctccagcgtttccaaacccatccatccccagaggttcttcccatctctccaggctgatgtgtgggaactcgaggaaataaatctccagtgggagacggaggggtggccagggaaacggggcgctgcaggaataaagacgagccagcacagccagctcatgtgtaacggctttgtggagctgtcaaggcctggtctctgggagagaggcacagggaggccagacaaggaaggggtgacctggagggacagatccaggggctaaagtcctgataaggcaagagagtgccggccccctcttgccctatcaggacctccactgccacatagaggccatgattgacccttagacaaagggctggtgtccaatcccagcccccagccccagaactccagggaatgaatgggcagagagcaggaatgtgggacatctgtgttcaagggaaggactccaggagtctgctgggaatgaggcctagtaggaaatgaggtggcccttgagggtacagaacaggttcattcttcgccaaattcccagcaccttgcaggcacttacagctgagtgagataatgcctgggttatgaaatcaaaaagttggaaagcaggtcagaggtcatctggtacagcccttccttccctttttttttttttttttttgtgagacaaggtctctctctgttgcccaggctggagtggcgcaaacacagctcactgcagcctcaacctactgggctcaagcaatcctccagcctcagcctcccaaagtgctgggattacaagcatgagccaccccactcagccctttccttcctttttaattgatgcataataattgtaagtattcatcatggtccaaccaaccctttcttgacccaccttcctagagagagggtcctcttgcttcagcggtcagggccccagacccatggtctggctccaggtaccacctgcctcatgcaggagttggcgtgcccaggaagctctgcctctgggcacagtgacctcagtggggtgaggggagctctccccatagctgggctgcggcccaaccccaccccctcaggctatgccagggggtgttgccaggggcacccgggcatcgccagtctagcccactccttcataaagccctcgcatcccaggagcgagcagagccagagcaggttggagaggagacgcatcacctccgctgctcgccgggatcctcgggagcaagcttgaactgaaaaaccagaaagttaactggtaagtttagtctttttgtcttttatttcaggtcccggatccggtggtggtgcaaatcaaagaactgctcctcagtggatgttgcctttacttctaggcctgtacggaagtgttacttctgctctaaaagctgcggaattgtacccgcggccgatccaccggtatgtggactctcgggcgccgcgcagtagccggcctcctggcgtcacccagcccagcccaggcccagaccctcacccgggtcccgcggccggcagagttggccccactctgcggccgccgtggcctgcgcaccgacatcgatgcgacctgcacgccccgccgcgcaagttcgaaccaacgtggcctcaaccagatttggaatgtcaaaaagcagagtgtctatttgatgaatttgaggaaatctggaactttgggccacccaggctctctagatgagaccacctatgaaagactagcagaggaaacgctggactctttagcagagttttttgaagaccttgcagacaagccatacacgtttgaggactatgatgtctcctttgggagtggtgtcttaactgtcaaactgggtggagatctaggaacctatgtgatcaacaagcagacgccaaacaagcaaatctggctatcttctccatccagtggacctaagcgttatgactggactgggaaaaactgggtgtactcccacgacggcgtgtccctccatgagctgctggccgcagagctcactaaagccttaaaaaccaaactggacttgtcttccttggcctattccggaaaagatgcttgagcggccctagcgtttaaacgggccctctagagtcgacccgggcggcctcgaggacggggtgaactacgcctgaggatccgatctttttccctctgccaaaaattatggggacatcatgaagccccttgagcatctgacttctggctaataaaggaaatttattttcattgcaatagtgtgttggaattttttgtgtctctcactcggcctaggtagataagtagcatggcgggttaatcattaactacaaggaacccctagtgatggagttggccactccctctctgcgcgctcgctcgctcactgaggccgggcgaccaaaggtcgcccgacgcccgggctttgcccgggcggcctcagtgagcgagcgagcgcgcagccttaattaacctaattcactggccgtcgttttacaacgtcgtgactgggaaaaccctggcgttacccaacttaatcgccttgcagcacatccccctttcgccagctggcgtaatagcgaagaggcccgcaccgatcgcccttcccaacagttgcgcagcctgaatggcgaatgggacgcgccctgtagcggcgcattaagcgcggcgggtgtggtggttacgcgcagcgtgaccgctacacttgccagcgccctagcgcccgctcctttcgctttcttcccttcctttctcgccacgttcgccggctttccccgtcaagctctaaatcgggggctccctttagggttccgatttagtgctttacggcacctcgaccccaaaaaacttgattagggtgatggttcacgtagtgggccatcgccctgatagacggtttttcgccctttgacgttggagtccacgttctttaatagtggactcttgttccaaactggaacaacactcaaccctatctcggtctattcttttgatttataagggattttgccgatttcggcctattggttaaaaaatgagctgatttaacaaaaatttaacgcgaattttaacaaaatattaacgcttacaatttaggtggcacttttcggggaaatgtgcgcggaacccctatttgtttatttttctaaatacattcaaatatgtatccgctcatgagacaataaccctgataaatgcttcaataatattgaaaaaggaagagtatgagtattcaacatttccgtgtcgcccttattcccttttttgcggcattttgccttcctgtttttgctcacccagaaacgctggtgaaagtaaaagatgctgaagatcagttgggtgcacgagtgggttacatcgaactggatctcaacagcggtaagatccttgagagttttcgccccgaagaacgttttccaatgatgagcacttttaaagttctgctatgtggcgcggtattatcccgtattgacgccgggcaagagcaactcggtcgccgcatacactattctcagaatgacttggttgagtactcaccagtcacagaaaagcatcttacggatggcatgacagtaagagaattatgcagtgctgccataaccatgagtgataacactgcggccaacttacttctgacaacgatcggaggaccgaaggagctaaccgcttttttgcacaacatgggggatcatgtaactcgccttgatcgttgggaaccggagctgaatgaagccataccaaacgacgagcgtgacaccacgatgcctgtagcaatggcaacaacgttgcgcaaactattaactggcgaactacttactctagcttcccggcaacaattaatagactggatggaggcggataaagttgcaggaccacttctgcgctcggcccttccggctggctggtttattgctgataaatctggagccggtgagcgtgggtctcgcggtatcattgcagcactggggccagatggtaagccctcccgtatcgtagttatctacacgacggggagtcaggcaactatggatgaacgaaatagacagatcgctgagataggtgcctcactgattaagcattggtaactgtcagaccaagtttactcatatatactttagattgatttaaaacttcatttttaatttaaaaggatctaggtgaagatcctttttgataatctcatgaccaaaatcccttaacgtgagttttcgttccactgagcgtcagaccccgtagaaaagatcaaaggatcttcttgagatcctttttttctgcgcgtaatctgctgcttgcaaacaaaaaaaccaccgctaccagcggtggtttgtttgccggatcaagagctaccaactctttttccgaaggtaactggcttcagcagagcgcagataccaaatactgttcttctagtgtagccgtagttaggccaccacttcaagaactctgtagcaccgcctacatacctcgctctgctaatcctgttaccagtggctgctgccagtggcgataagtcgtgtcttaccgggttggactcaagacgatagttaccggataaggcgcagcggtcgggctgaacggggggttcgtgcacacagcccagcttggagcgaacgacctacaccgaactgagatacctacagcgtgagctatgagaaagcgccacgcttcccgaagggagaaaggcggacaggtatccggtaagcggcagggtcggaacaggagagcgcacgagggagcttccagggggaaacgcctggtatctttatagtcctgtcgggtttcgccacctctgacttgagcgtcgatttttgtgatgctcgtcaggggggcggagcctatggaaaaacgccagcaacgcggcctttttacggttcctggccttttgctggccttttgctcacatgttctttcctgcgttatcccctgattctgtggataaccgtattaccgcctttgagtgagctgataccgctcgccgcagccgaacgaccgagcgcagcgagtcagtgagcgaggaagcggaagagcgcccaatacgcaaaccgcctctccccgcgcgttggccgattcattaatgcagctggcacgacaggtttcccgactggaaagcgggcagtgagcgcaacgcaattaatgtgagttagctcactcattaggcaccccaggctttacactttatgcttccggctcgtatgttgtgtggaattgtgagcggataa

SEQ ID NO: 654 - DNA, 4699 bp, Artificial Sequence
  Description of Artificial Sequence: Synthetic polynucleotide
caatttcacacaggaaacagctatgaccatgattacgccagatttaattaaggccttaattaggctgcgcgctcgctcgctcactgaggccgcccgggcaaagcccgggcgtcgggcgacctttggtcgcccggcctcagtgagcgagcgagcgcgcagagagggagtgtagccatgctctaggaagatcaattcaattcacgcgtactatagtccacggggttggggttgcgccttttccaaggcagccctgggtttgcgcagggacgcggctgctctgggcgtggttccgggaaacgcagcggcgccgaccctgggtctcgcacattcttcacgtccgttcgcagcgtcacccggatcttcgccgctacccttgtgggccccccggcgacgcttcctcgtccgcccctaagtcgggaaggttccttgcggttcgcggcgtgccggacgtgacaaacggaagccgcacgtctcactagtaccctcgcagacggacagcgccagggagcaatggcagcgcgccgaccgcgatgggctgtggccaatagcggctgctcagcagggcgcgccgagagcagcggccgggaaggggcggtgcgggaggcggggtgtggggcggtagtgtgggccctgttcctgcccgcgcggtgttccgcattctgcaagcctccggagcgcacgtcggcagtcggctccctcgttgaccgaatcaccgacctctctccccacgggagcaagcttgaactgaaaaaccagaaagttaactggtaagtttagtctttttgtcttttatttcaggtcccggatccggtggtggtgcaaatcaaagaactgctcctcagtggatgttgcctttacttctaggcctgtacggaagtgttacttctgctctaaaagctgcggaattgtacccgcggccgatccaccggtatgtggactctcgggcgccgcgcagtagccggcctcctggcgtcacccagcccagcccaggcccagaccctcacccgggtcccgcggccggcagagttggccccactctgcggccgccgtggcctgcgcaccgacatcgatgcgacctgcacgccccgccgcgcaagttcgaaccaacgtggcctcaaccagatttggaatgtcaaaaagcagagtgtctatttgatgaatttgaggaaatctggaactttgggccacccaggctctctagatgagaccacctatgaaagactagcagaggaaacgctggactctttagcagagttttttgaagaccttgcagacaagccatacacgtttgaggactatgatgtctcctttgggagtggtgtcttaactgtcaaactgggtggagatctaggaacctatgtgatcaacaagcagacgccaaacaagcaaatctggctatcttctccatccagtggacctaagcgttatgactggactgggaaaaactgggtgtactcccacgacggcgtgtccctccatgagctgctggccgcagagctcactaaagccttaaaaaccaaactggacttgtcttccttggcctattccggaaaagatgcttgagcggccctagcgtttaaacgggccctctagagtcgacccgggcggcctcgaggacggggtgaactacgcctgaggatccgatctttttccctctgccaaaaattatggggacatcatgaagccccttgagcatctgacttctggctaataaaggaaatttattttcattgcaatagtgtgttggaattttttgtgtctctcactcggcctaggtagataagtagcatggcgggttaatcattaactacaaggaacccctagtgatggagttggccactccctctctgcgcgctcgctcgctcactgaggccgggcgaccaaaggtcgcccgacgcccgggctttgcccgggcggcctcagtgagcgagcgagcgcgcagccttaattaacctaattcactggccgtcgttttacaacgtcgtgactgggaaaaccctggcgttacccaacttaatcgccttgcagcacatccccctttcgccagctggcgtaatagcgaagaggcccgcaccgatcgcccttcccaacagttgcgcagcctgaatggcgaatgggacgcgccctgtagcggcgcattaagcgcggcgggtgtggtggttacgcgcagcgtgaccgctacacttgccagcgccctagcgcccgctcctttcgctttcttcccttcctttctcgccacgttcgccggctttccccgtcaagctctaaatcgggggctccctttagggttccgatttagtgctttacggcacctcgaccccaaaaaacttgattagggtgatggttcacgtagtgggccatcgccctgatagacggtttttcgccctttgacgttggagtccacgttctttaatagtggactcttgttccaaactggaacaacactcaaccctatctcggtctattcttttgatttataagggattttgccgatttcggcctattggttaaaaaatgagctgatttaacaaaaatttaacgcgaattttaacaaaatattaacgcttacaatttaggtggcacttttcggggaaatgtgcgcggaacccctatttgtttatttttctaaatacattcaaatatgtatccgctcatgagacaataaccctgataaatgcttcaataatattgaaaaaggaagagtatgagtattcaacatttccgtgtcgcccttattcccttttttgcggcattttgccttcctgtttttgctcacccagaaacgctggtgaaagtaaaagatgctgaagatcagttgggtgcacgagtgggttacatcgaactggatctcaacagcggtaagatccttgagagttttcgccccgaagaacgttttccaatgatgagcacttttaaagttctgctatgtggcgcggtattatcccgtattgacgccgggcaagagcaactcggtcgccgcatacactattctcagaatgacttggttgagtactcaccagtcacagaaaagcatcttacggatggcatgacagtaagagaattatgcagtgctgccataaccatgagtgataacactgcggccaacttacttctgacaacgatcggaggaccgaaggagctaaccgcttttttgcacaacatgggggatcatgtaactcgccttgatcgttgggaaccggagctgaatgaagccataccaaacgacgagcgtgacaccacgatgcctgtagcaatggcaacaacgttgcgcaaactattaactggcgaactacttactctagcttcccggcaacaattaatagactggatggaggcggataaagttgcaggaccacttctgcgctcggcccttccggctggctggtttattgctgataaatctggagccggtgagcgtgggtctcgcggtatcattgcagcactggggccagatggtaagccctcccgtatcgtagttatctacacgacggggagtcaggcaactatggatgaacgaaatagacagatcgctgagataggtgcctcactgattaagcattggtaactgtcagaccaagtttactcatatatactttagattgatttaaaacttcatttttaatttaaaaggatctaggtgaagatcctttttgataatctcatgaccaaaatcccttaacgtgagttttcgttccactgagcgtcagaccccgtagaaaagatcaaaggatcttcttgagatcctttttttctgcgcgtaatctgctgcttgcaaacaaaaaaaccaccgctaccagcggtggtttgtttgccggatcaagagctaccaactctttttccgaaggtaactggcttcagcagagcgcagataccaaatactgttcttctagtgtagccgtagttaggccaccacttcaagaactctgtagcaccgcctacatacctcgctctgctaatcctgttaccagtggctgctgccagtggcgataagtcgtgtcttaccgggttggactcaagacgatagttaccggataaggcgcagcggtcgggctgaacggggggttcgtgcacacagcccagcttggagcgaacgacctacaccgaactgagatacctacagcgtgagctatgagaaagcgccacgcttcccgaagggagaaaggcggacaggtatccggtaagcggcagggtcggaacaggagagcgcacgagggagcttccagggggaaacgcctggtatctttatagtcctgtcgggtttcgccacctctgacttgagcgtcgatttttgtgatgctcgtcaggggggcggagcctatggaaaaacgccagcaacgcggcctttttacggttcctggccttttgctggccttttgctcacatgttctttcctgcgttatcccctgattctgtggataaccgtattaccgcctttgagtgagctgataccgctcgccgcagccgaacgaccgagcgcagcgagtcagtgagcgaggaagcggaagagcgcccaatacgcaaaccgcctctccccgcgcgttggccgattcattaatgcagctggcacgacaggtttcccgactggaaagcgggcagtgagcgcaacgcaattaatgtgagttagctcactcattaggcaccccaggctttacactttatgcttccggctcgtatgttgtgtggaattgtgagcggataa

SEQ ID NO: 655 - DNA, 4653 bp, Artificial Sequence
  Description of Artificial Sequence: Synthetic polynucleotide
caatttcacacaggaaacagctatgaccatgattacgccagatttaattaaggccttaattaggctgcgcgctcgctcgctcactgaggccgcccgggcaaagcccgggcgtcgggcgacctttggtcgcccggcctcagtgagcgagcgagcgcgcagagagggagtgtagccatgctctaggaagatcaattcaattcacgcgtactatagtccacggggttggggttgcgccttttccaaggcagccctgggtttgcgcagggacgcggctgctctgggcgtggttccgggaaacgcagcggcgccgaccctgggtctcgcacattcttcacgtccgttcgcagcgtcacccggatcttcgccgctacccttgtgggccccccggcgacgcttcctcgtccgcccctaagtcgggaaggttccttgcggttcgcggcgtgccggacgtgacaaacggaagccgcacgtctcactagtaccctcgcagacggacagcgccagggagcaatggcagcgcgccgaccgcgatgggctgtggccaatagcggctgctcagcagggcgcgccgagagcagcggccgggaaggggcggtgcgggaggcggggtgtggggcggtagtgtgggccctgttcctgcccgcgcggtgttccgcattctgcaagcctccggagcgcacgtcggcagtcggctccctcgttgaccgaatcaccgacctctctccccacgggagcaagcttgaactgaaaaaccagaaagttaactggtaagtttagtctttttgtcttttatttcaggtcccggatccggtggtggtgcaaatcaaagaactgctcctcagtggatgttgcctttacttctaggcctgtacggaagtgttacttctgctctaaaagctgcggaattgtacccgcggccgatccaccggtatgtggacactcgggcgacgcgccgtggctgggctgcttgcttccccaagtcccgcacaggcgcaaaccctcacaagggtcccacggccagctgaattggccccgctgtgcggtcggaggggcctgcgaacagatatagacgcaacgtgcacccccagaagagcaagcagcaaccagagaggcctcaatcagatttggaacgtcaagaaacagagtgtctatctgatgaacctccgcaaatcagggacccttggtcatccgggatctcttgatgaaacgacctatgaacggctggctgaggagacgcttgactccctggcagagttcttcgaggatctggctgataagccatacacgttcgaggactatgatgtttcttttggttctggcgtcctgacggtgaaactcggaggggatctgggcacttacgttatcaacaaacagactcccaataaacagatttggttgtctagtcctagcagtggcccaaaacgctatgactggacgggcaagaactgggtgtactcccacgatggagttagcctgcacgaacttctggccgctgagcttactaaagcgctgaagactaagctggatctctccagcctcgcatacagcggcaaagacgcctagctcgaggacggggtgaactacgcctgaggatccgatctttttccctctgccaaaaattatggggacatcatgaagccccttgagcatctgacttctggctaataaaggaaatttattttcattgcaatagtgtgttggaattttttgtgtctctcactcggcctaggtagataagtagcatggcgggttaatcattaactacaaggaacccctagtgatggagttggccactccctctctgcgcgctcgctcgctcactgaggccgggcgaccaaaggtcgcccgacgcccgggctttgcccgggcggcctcagtgagcgagcgagcgcgcagccttaattaacctaattcactggccgtcgttttacaacgtcgtgactgggaaaaccctggcgttacccaacttaatcgccttgcagcacatccccctttcgccagctggcgtaatagcgaagaggcccgcaccgatcgcccttcccaacagttgcgcagcctgaatggcgaatgggacgcgccctgtagcggcgcattaagcgcggcgggtgtggtggttacgcgcagcgtgaccgctacacttgccagcgccctagcgcccgctcctttcgctttcttcccttcctttctcgccacgttcgccggctttccccgtcaagctctaaatcgggggctccctttagggttccgatttagtgctttacggcacctcgaccccaaaaaacttgattagggtgatggttcacgtagtgggccatcgccctgatagacggtttttcgccctttgacgttggagtccacgttctttaatagtggactcttgttccaaactggaacaacactcaaccctatctcggtctattcttttgatttataagggattttgccgatttcggcctattggttaaaaaatgagctgatttaacaaaaatttaacgcgaattttaacaaaatattaacgcttacaatttaggtggcacttttcggggaaatgtgcgcggaacccctatttgtttatttttctaaatacattcaaatatgtatccgctcatgagacaataaccctgataaatgcttcaataatattgaaaaaggaagagtatgagtattcaacatttccgtgtcgcccttattcccttttttgcggcattttgccttcctgtttttgctcacccagaaacgctggtgaaagtaaaagatgctgaagatcagttgggtgcacgagtgggttacatcgaactggatctcaacagcggtaagatccttgagagttttcgccccgaagaacgttttccaatgatgagcacttttaaagttctgctatgtggcgcggtattatcccgtattgacgccgggcaagagcaactcggtcgccgcatacactattctcagaatgacttggttgagtactcaccagtcacagaaaagcatcttacggatggcatgacagtaagagaattatgcagtgctgccataaccatgagtgataacactgcggccaacttacttctgacaacgatcggaggaccgaaggagctaaccgcttttttgcacaacatgggggatcatgtaactcgccttgatcgttgggaaccggagctgaatgaagccataccaaacgacgagcgtgacaccacgatgcctgtagcaatggcaacaacgttgcgcaaactattaactggcgaactacttactctagcttcccggcaacaattaatagactggatggaggcggataaagttgcaggaccacttctgcgctcggcccttccggctggctggtttattgctgataaatctggagccggtgagcgtgggtctcgcggtatcattgcagcactggggccagatggtaagccctcccgtatcgtagttatctacacgacggggagtcaggcaactatggatgaacgaaatagacagatcgctgagataggtgcctcactgattaagcattggtaactgtcagaccaagtttactcatatatactttagattgatttaaaacttcatttttaatttaaaaggatctaggtgaagatcctttttgataatctcatgaccaaaatcccttaacgtgagttttcgttccactgagcgtcagaccccgtagaaaagatcaaaggatcttcttgagatcctttttttctgcgcgtaatctgctgcttgcaaacaaaaaaaccaccgctaccagcggtggtttgtttgccggatcaagagctaccaactctttttccgaaggtaactggcttcagcagagcgcagataccaaatactgttcttctagtgtagccgtagttaggccaccacttcaagaactctgtagcaccgcctacatacctcgctctgctaatcctgttaccagtggctgctgccagtggcgataagtcgtgtcttaccgggttggactcaagacgatagttaccggataaggcgcagcggtcgggctgaacggggggttcgtgcacacagcccagcttggagcgaacgacctacaccgaactgagatacctacagcgtgagctatgagaaagcgccacgcttcccgaagggagaaaggcggacaggtatccggtaagcggcagggtcggaacaggagagcgcacgagggagcttccagggggaaacgcctggtatctttatagtcctgtcgggtttcgccacctctgacttgagcgtcgatttttgtgatgctcgtcaggggggcggagcctatggaaaaacgccagcaacgcggcctttttacggttcctggccttttgctggccttttgctcacatgttctttcctgcgttatcccctgattctgtggataaccgtattaccgcctttgagtgagctgataccgctcgccgcagccgaacgaccgagcgcagcgagtcagtgagcgaggaagcggaagagcgcccaatacgcaaaccgcctctccccgcgcgttggccgattcattaatgcagctggcacgacaggtttcccgactggaaagcgggcagtgagcgcaacgcaattaatgtgagttagctcactcattaggcaccccaggctttacactttatgcttccggctcgtatgttgtgtggaattgtgagcggataa

SEQ ID NO: 656 - DNA, 4653 bp, Artificial Sequence
  Description of Artificial Sequence: Synthetic polynucleotide
caatttcacacaggaaacagctatgaccatgattacgccagatttaattaaggccttaattaggctgcgcgctcgctcgctcactgaggccgcccgggcaaagcccgggcgtcgggcgacctttggtcgcccggcctcagtgagcgagcgagcgcgcagagagggagtgtagccatgctctaggaagatcaattcaattcacgcgtactatagtccacggggttggggttgcgccttttccaaggcagccctgggtttgcgcagggacgcggctgctctgggcgtggttccgggaaacgcagcggcgccgaccctgggtctcgcacattcttcacgtccgttcgcagcgtcacccggatcttcgccgctacccttgtgggccccccggcgacgcttcctcgtccgcccctaagtcgggaaggttccttgcggttcgcggcgtgccggacgtgacaaacggaagccgcacgtctcactagtaccctcgcagacggacagcgccagggagcaatggcagcgcgccgaccgcgatgggctgtggccaatagcggctgctcagcagggcgcgccgagagcagcggccgggaaggggcggtgcgggaggcggggtgtggggcggtagtgtgggccctgttcctgcccgcgcggtgttccgcattctgcaagcctccggagcgcacgtcggcagtcggctccctcgttgaccgaatcaccgacctctctccccacgggagcaagcttgaactgaaaaaccagaaagttaactggtaagtttagtctttttgtcttttatttcaggtcccggatccggtggtggtgcaaatcaaagaactgctcctcagtggatgttgcctttacttctaggcctgtacggaagtgttacttctgctctaaaagctgcggaattgtacccgcggccgatccaccggtatgtggactctgggtcgacgcgccgtagccggtctcttggcctccccatcccctgcgcaggcacagacccttacacgagttccacggcccgctgaactggcaccactctgcggacgccggggcctgagaaccgatattgacgctacgtgcactccccgacgagcctcttctaatcagagggggctcaaccagatctggaacgtgaagaagcagtcagtctacttgatgaatctgagaaagagcgggacccttgggcaccccgggtctctcgacgagactacatacgagaggctggccgaggagactttggactctctcgccgaattcttcgaggatttggcagacaagccgtacacctttgaagactacgatgtctcattcggatcaggggtgctgacggttaaactggggggcgatctcggaacctacgtcataaacaaacagacacccaataagcagatctggttgtctagcccatcatccggtcctaaacggtacgactggaccggcaagaactgggtctactcccatgacggagtcagtcttcatgaactgcttgccgcagagctgaccaaggctcttaagacgaaactggatctctctagcctggcctactccgggaaggatgcatagctcgaggacggggtgaactacgcctgaggatccgatctttttccctctgccaaaaattatggggacatcatgaagccccttgagcatctgacttctggctaataaaggaaatttattttcattgcaatagtgtgttggaattttttgtgtctctcactcggcctaggtagataagtagcatggcgggttaatcattaactacaaggaacccctagtgatggagttggccactccctctctgcgcgctcgctcgctcactgaggccgggcgaccaaaggtcgcccgacgcccgggctttgcccgggcggcctcagtgagcgagcgagcgcgcagccttaattaacctaattcactggccgtcgttttacaacgtcgtgactgggaaaaccctggcgttacccaacttaatcgccttgcagcacatccccctttcgccagctggcgtaatagcgaagaggcccgcaccgatcgcccttcccaacagttgcgcagcctgaatggcgaatgggacgcgccctgtagcggcgcattaagcgcggcgggtgtggtggttacgcgcagcgtgaccgctacacttgccagcgccctagcgcccgctcctttcgctttcttcccttcctttctcgccacgttcgccggctttccccgtcaagctctaaatcgggggctccctttagggttccgatttagtgctttacggcacctcgaccccaaaaaacttgattagggtgatggttcacgtagtgggccatcgccctgatagacggtttttcgccctttgacgttggagtccacgttctttaatagtggactcttgttccaaactggaacaacactcaaccctatctcggtctattcttttgatttataagggattttgccgatttcggcctattggttaaaaaatgagctgatttaacaaaaatttaacgcgaattttaacaaaatattaacgcttacaatttaggtggcacttttcggggaaatgtgcgcggaacccctatttgtttatttttctaaatacattcaaatatgtatccgctcatgagacaataaccctgataaatgcttcaataatattgaaaaaggaagagtatgagtattcaacatttccgtgtcgcccttattcccttttttgcggcattttgccttcctgtttttgctcacccagaaacgctggtgaaagtaaaagatgctgaagatcagttgggtgcacgagtgggttacatcgaactggatctcaacagcggtaagatccttgagagttttcgccccgaagaacgttttccaatgatgagcacttttaaagttctgctatgtggcgcggtattatcccgtattgacgccgggcaagagcaactcggtcgccgcatacactattctcagaatgacttggttgagtactcaccagtcacagaaaagcatcttacggatggcatgacagtaagagaattatgcagtgctgccataaccatgagtgataacactgcggccaacttacttctgacaacgatcggaggaccgaaggagctaaccgcttttttgcacaacatgggggatcatgtaactcgccttgatcgttgggaaccggagctgaatgaagccataccaaacgacgagcgtgacaccacgatgcctgtagcaatggcaacaacgttgcgcaaactattaactggcgaactacttactctagcttcccggcaacaattaatagactggatggaggcggataaagttgcaggaccacttctgcgctcggcccttccggctggctggtttattgctgataaatctggagccggtgagcgtgggtctcgcggtatcattgcagcactggggccagatggtaagccctcccgtatcgtagttatctacacgacggggagtcaggcaactatggatgaacgaaatagacagatcgctgagataggtgcctcactgattaagcattggtaactgtcagaccaagtttactcatatatactttagattgatttaaaacttcatttttaatttaaaaggatctaggtgaagatcctttttgataatctcatgaccaaaatcccttaacgtgagttttcgttccactgagcgtcagaccccgtagaaaagatcaaaggatcttcttgagatcctttttttctgcgcgtaatctgctgcttgcaaacaaaaaaaccaccgctaccagcggtggtttgtttgccggatcaagagctaccaactctttttccgaaggtaactggcttcagcagagcgcagataccaaatactgttcttctagtgtagccgtagttaggccaccacttcaagaactctgtagcaccgcctacatacctcgctctgctaatcctgttaccagtggctgctgccagtggcgataagtcgtgtcttaccgggttggactcaagacgatagttaccggataaggcgcagcggtcgggctgaacggggggttcgtgcacacagcccagcttggagcgaacgacctacaccgaactgagatacctacagcgtgagctatgagaaagcgccacgcttcccgaagggagaaaggcggacaggtatccggtaagcggcagggtcggaacaggagagcgcacgagggagcttccagggggaaacgcctggtatctttatagtcctgtcgggtttcgccacctctgacttgagcgtcgatttttgtgatgctcgtcaggggggcggagcctatggaaaaacgccagcaacgcggcctttttacggttcctggccttttgctggccttttgctcacatgttctttcctgcgttatcccctgattctgtggataaccgtattaccgcctttgagtgagctgataccgctcgccgcagccgaacgaccgagcgcagcgagtcagtgagcgaggaagcggaagagcgcccaatacgcaaaccgcctctccccgcgcgttggccgattcattaatgcagctggcacgacaggtttcccgactggaaagcgggcagtgagcgcaacgcaattaatgtgagttagctcactcattaggcaccccaggctttacactttatgcttccggctcgtatgttgtgtggaattgtgagcggataa

SEQ ID NO: 657 - DNA, 4653 bp, Artificial Sequence
  Description of Artificial Sequence: Synthetic polynucleotide
caatttcacacaggaaacagctatgaccatgattacgccagatttaattaaggccttaattaggctgcgcgctcgctcgctcactgaggccgcccgggcaaagcccgggcgtcgggcgacctttggtcgcccggcctcagtgagcgagcgagcgcgcagagagggagtgtagccatgctctaggaagatcaattcaattcacgcgtactatagtccacggggttggggttgcgccttttccaaggcagccctgggtttgcgcagggacgcggctgctctgggcgtggttccgggaaacgcagcggcgccgaccctgggtctcgcacattcttcacgtccgttcgcagcgtcacccggatcttcgccgctacccttgtgggccccccggcgacgcttcctcgtccgcccctaagtcgggaaggttccttgcggttcgcggcgtgccggacgtgacaaacggaagccgcacgtctcactagtaccctcgcagacggacagcgccagggagcaatggcagcgcgccgaccgcgatgggctgtggccaatagcggctgctcagcagggcgcgccgagagcagcggccgggaaggggcggtgcgggaggcggggtgtggggcggtagtgtgggccctgttcctgcccgcgcggtgttccgcattctgcaagcctccggagcgcacgtcggcagtcggctccctcgttgaccgaatcaccgacctctctccccacgggagcaagcttgaactgaaaaaccagaaagttaactggtaagtttagtctttttgtcttttatttcaggtcccggatccggtggtggtgcaaatcaaagaactgctcctcagtggatgttgcctttacttctaggcctgtacggaagtgttacttctgctctaaaagctgcggaattgtacccgcggccgatccaccggtatgtggactctcgggcgacgcgccgtagccggtctcctggcttccccaagccctgcacaggcacagaccctcacacgggtcccacggccagctgaattggccccactctgcggtcgccggggcctgcgaaccgatatagacgcaacgtgcactccccgacgagcaagttccaaccagagagggctcaaccagatttggaacgtcaagaagcagagtgtctatttgatgaatctgagaaaatccgggacccttgggcaccccggatctcttgatgaaactacctatgaaaggctggccgaggagacgctggactctctggcagagttcttcgaggatctggcagacaagccatacacgtttgaggactatgatgtctcttttggatctggcgtcctgacggttaaactgggaggggatctcggaacctacgttatcaacaaacagactcccaataagcagatctggttgtctagtccatccagtggtcctaaacgctatgactggacgggcaagaactgggtgtactcccacgacggagttagccttcatgaactgctggccgcagagctgactaaagctcttaagactaaactggatctctctagcctggcctactccgggaaagatgcctagctcgaggacggggtgaactacgcctgaggatccgatctttttccctctgccaaaaattatggggacatcatgaagccccttgagcatctgacttctggctaataaaggaaatttattttcattgcaatagtgtgttggaattttttgtgtctctcactcggcctaggtagataagtagcatggcgggttaatcattaactacaaggaacccctagtgatggagttggccactccctctctgcgcgctcgctcgctcactgaggccgggcgaccaaaggtcgcccgacgcccgggctttgcccgggcggcctcagtgagcgagcgagcgcgcagccttaattaacctaattcactggccgtcgttttacaacgtcgtgactgggaaaaccctggcgttacccaacttaatcgccttgcagcacatccccctttcgccagctggcgtaatagcgaagaggcccgcaccgatcgcccttcccaacagttgcgcagcctgaatggcgaatgggacgcgccctgtagcggcgcattaagcgcggcgggtgtggtggttacgcgcagcgtgaccgctacacttgccagcgccctagcgcccgctcctttcgctttcttcccttcctttctcgccacgttcgccggctttccccgtcaagctctaaatcgggggctccctttagggttccgatttagtgctttacggcacctcgaccccaaaaaacttgattagggtgatggttcacgtagtgggccatcgccctgatagacggtttttcgccctttgacgttggagtccacgttctttaatagtggactcttgttccaaactggaacaacactcaaccctatctcggtctattcttttgatttataagggattttgccgatttcggcctattggttaaaaaatgagctgatttaacaaaaatttaacgcgaattttaacaaaatattaacgcttacaatttaggtggcacttttcggggaaatgtgcgcggaacccctatttgtttatttttctaaatacattcaaatatgtatccgctcatgagacaataaccctgataaatgcttcaataatattgaaaaaggaagagtatgagtattcaacatttccgtgtcgcccttattcccttttttgcggcattttgccttcctgtttttgctcacccagaaacgctggtgaaagtaaaagatgctgaagatcagttgggtgcacgagtgggttacatcgaactggatctcaacagcggtaagatccttgagagttttcgccccgaagaacgttttccaatgatgagcacttttaaagttctgctatgtggcgcggtattatcccgtattgacgccgggcaagagcaactcggtcgccgcatacactattctcagaatgacttggttgagtactcaccagtcacagaaaagcatcttacggatggcatgacagtaagagaattatgcagtgctgccataaccatgagtgataacactgcggccaacttacttctgacaacgatcggaggaccgaaggagctaaccgcttttttgcacaacatgggggatcatgtaactcgccttgatcgttgggaaccggagctgaatgaagccataccaaacgacgagcgtgacaccacgatgcctgtagcaatggcaacaacgttgcgcaaactattaactggcgaactacttactctagcttcccggcaacaattaatagactggatggaggcggataaagttgcaggaccacttctgcgctcggcccttccggctggctggtttattgctgataaatctggagccggtgagcgtgggtctcgcggtatcattgcagcactggggccagatggtaagccctcccgtatcgtagttatctacacgacggggagtcaggcaactatggatgaacgaaatagacagatcgctgagataggtgcctcactgattaagcattggtaactgtcagaccaagtttactcatatatactttagattgatttaaaacttcatttttaatttaaaaggatctaggtgaagatcctttttgataatctcatgaccaaaatcccttaacgtgagttttcgttccactgagcgtcagaccccgtagaaaagatcaaaggatcttcttgagatcctttttttctgcgcgtaatctgctgcttgcaaacaaaaaaaccaccgctaccagcggtggtttgtttgccggatcaagagctaccaactctttttccgaaggtaactggcttcagcagagcgcagataccaaatactgttcttctagtgtagccgtagttaggccaccacttcaagaactctgtagcaccgcctacatacctcgctctgctaatcctgttaccagtggctgctgccagtggcgataagtcgtgtcttaccgggttggactcaagacgatagttaccggataaggcgcagcggtcgggctgaacggggggttcgtgcacacagcccagcttggagcgaacgacctacaccgaactgagatacctacagcgtgagctatgagaaagcgccacgcttcccgaagggagaaaggcggacaggtatccggtaagcggcagggtcggaacaggagagcgcacgagggagcttccagggggaaacgcctggtatctttatagtcctgtcgggtttcgccacctctgacttgagcgtcgatttttgtgatgctcgtcaggggggcggagcctatggaaaaacgccagcaacgcggcctttttacggttcctggccttttgctggccttttgctcacatgttctttcctgcgttatcccctgattctgtggataaccgtattaccgcctttgagtgagctgataccgctcgccgcagccgaacgaccgagcgcagcgagtcagtgagcgaggaagcggaagagcgcccaatacgcaaaccgcctctccccgcgcgttggccgattcattaatgcagctggcacgacaggtttcccgactggaaagcgggcagtgagcgcaacgcaattaatgtgagttagctcactcattaggcaccccaggctttacactttatgcttccggctcgtatgttgtgtggaattgtgagcggataa

SEQ ID NO: 658 - DNA, 4653 bp, Artificial Sequence
  Description of Artificial Sequence: Synthetic polynucleotide
caatttcacacaggaaacagctatgaccatgattacgccagatttaattaaggccttaattaggctgcgcgctcgctcgctcactgaggccgcccgggcaaagcccgggcgtcgggcgacctttggtcgcccggcctcagtgagcgagcgagcgcgcagagagggagtgtagccatgctctaggaagatcaattcaattcacgcgtactatagtccacggggttggggttgcgccttttccaaggcagccctgggtttgcgcagggacgcggctgctctgggcgtggttccgggaaacgcagcggcgccgaccctgggtctcgcacattcttcacgtccgttcgcagcgtcacccggatcttcgccgctacccttgtgggccccccggcgacgcttcctcgtccgcccctaagtcgggaaggttccttgcggttcgcggcgtgccggacgtgacaaacggaagccgcacgtctcactagtaccctcgcagacggacagcgccagggagcaatggcagcgcgccgaccgcgatgggctgtggccaatagcggctgctcagcagggcgcgccgagagcagcggccgggaaggggcggtgcgggaggcggggtgtggggcggtagtgtgggccctgttcctgcccgcgcggtgttccgcattctgcaagcctccggagcgcacgtcggcagtcggctccctcgttgaccgaatcaccgacctctctccccacgggagcaagcttgaactgaaaaaccagaaagttaactggtaagtttagtctttttgtcttttatttcaggtcccggatccggtggtggtgcaaatcaaagaactgctcctcagtggatgttgcctttacttctaggcctgtacggaagtgttacttctgctctaaaagctgcggaattgtacccgcggccgatccaccggtatgtggactctggggcgacgcgccgtggccgggctcctggcatccccatcccctgcgcaggcgcaaaccctcacacgggttccacggccagctgaactggccccactgtgcggccggcggggcctgagaacagatattgacgcaacgtgcactcccagaagagccagcagcaaccagagggggttgaatcagatctggaacgtcaagaagcagtcagtgtacctgatgaatctccgaaaaagcgggacccttggtcaccccggatctctcgatgaaaccacatatgaacggctggccgaggaaacgctggactccctggccgagttcttcgaggacctggcagacaagccgtacaccttcgaagactatgatgtttcattcggaagtggcgtgctgacggtcaaactgggaggcgatctgggaacctacgttataaacaaacagactcccaataaacagatctggttgtctagtccatccagcggtcctaaacgctatgactggacgggcaagaactgggtctactcccacgacggagttagccttcacgaactgttggccgcagagctgacaaaggcgcttaagacgaaactggatctctctagcctggcctactccggcaaagatgcctagctcgaggacggggtgaactacgcctgaggatccgatctttttccctctgccaaaaattatggggacatcatgaagccccttgagcatctgacttctggctaataaaggaaatttattttcattgcaatagtgtgttggaattttttgtgtctctcactcggcctaggtagataagtagcatggcgggttaatcattaactacaaggaacccctagtgatggagttggccactccctctctgcgcgctcgctcgctcactgaggccgggcgaccaaaggtcgcccgacgcccgggctttgcccgggcggcctcagtgagcgagcgagcgcgcagccttaattaacctaattcactggccgtcgttttacaacgtcgtgactgggaaaaccctggcgttacccaacttaatcgccttgcagcacatccccctttcgccagctggcgtaatagcgaagaggcccgcaccgatcgcccttcccaacagttgcgcagcctgaatggcgaatgggacgcgccctgtagcggcgcattaagcgcggcgggtgtggtggttacgcgcagcgtgaccgctacacttgccagcgccctagcgcccgctcctttcgctttcttcccttcctttctcgccacgttcgccggctttccccgtcaagctctaaatcgggggctccctttagggttccgatttagtgctttacggcacctcgaccccaaaaaacttgattagggtgatggttcacgtagtgggccatcgccctgatagacggtttttcgccctttgacgttggagtccacgttctttaatagtggactcttgttccaaactggaacaacactcaaccctatctcggtctattcttttgatttataagggattttgccgatttcggcctattggttaaaaaatgagctgatttaacaaaaatttaacgcgaattttaacaaaatattaacgcttacaatttaggtggcacttttcggggaaatgtgcgcggaacccctatttgtttatttttctaaatacattcaaatatgtatccgctcatgagacaataaccctgataaatgcttcaataatattgaaaaaggaagagtatgagtattcaacatttccgtgtcgcccttattcccttttttgcggcattttgccttcctgtttttgctcacccagaaacgctggtgaaagtaaaagatgctgaagatcagttgggtgcacgagtgggttacatcgaactggatctcaacagcggtaagatccttgagagttttcgccccgaagaacgttttccaatgatgagcacttttaaagttctgctatgtggcgcggtattatcccgtattgacgccgggcaagagcaactcggtcgccgcatacactattctcagaatgacttggttgagtactcaccagtcacagaaaagcatcttacggatggcatgacagtaagagaattatgcagtgctgccataaccatgagtgataacactgcggccaacttacttctgacaacgatcggaggaccgaaggagctaaccgcttttttgcacaacatgggggatcatgtaactcgccttgatcgttgggaaccggagctgaatgaagccataccaaacgacgagcgtgacaccacgatgcctgtagcaatggcaacaacgttgcgcaaactattaactggcgaactacttactctagcttcccggcaacaattaatagactggatggaggcggataaagttgcaggaccacttctgcgctcggcccttccggctggctggtttattgctgataaatctggagccggtgagcgtgggtctcgcggtatcattgcagcactggggccagatggtaagccctcccgtatcgtagttatctacacgacggggagtcaggcaactatggatgaacgaaatagacagatcgctgagataggtgcctcactgattaagcattggtaactgtcagaccaagtttactcatatatactttagattgatttaaaacttcatttttaatttaaaaggatctaggtgaagatcctttttgataatctcatgaccaaaatcccttaacgtgagttttcgttccactgagcgtcagaccccgtagaaaagatcaaaggatcttcttgagatcctttttttctgcgcgtaatctgctgcttgcaaacaaaaaaaccaccgctaccagcggtggtttgtttgccggatcaagagctaccaactctttttccgaaggtaactggcttcagcagagcgcagataccaaatactgttcttctagtgtagccgtagttaggccaccacttcaagaactctgtagcaccgcctacatacctcgctctgctaatcctgttaccagtggctgctgccagtggcgataagtcgtgtcttaccgggttggactcaagacgatagttaccggataaggcgcagcggtcgggctgaacggggggttcgtgcacacagcccagcttggagcgaacgacctacaccgaactgagatacctacagcgtgagctatgagaaagcgccacgcttcccgaagggagaaaggcggacaggtatccggtaagcggcagggtcggaacaggagagcgcacgagggagcttccagggggaaacgcctggtatctttatagtcctgtcgggtttcgccacctctgacttgagcgtcgatttttgtgatgctcgtcaggggggcggagcctatggaaaaacgccagcaacgcggcctttttacggttcctggccttttgctggccttttgctcacatgttctttcctgcgttatcccctgattctgtggataaccgtattaccgcctttgagtgagctgataccgctcgccgcagccgaacgaccgagcgcagcgagtcagtgagcgaggaagcggaagagcgcccaatacgcaaaccgcctctccccgcgcgttggccgattcattaatgcagctggcacgacaggtttcccgactggaaagcgggcagtgagcgcaacgcaattaatgtgagttagctcactcattaggcaccccaggctttacactttatgcttccggctcgtatgttgtgtggaattgtgagcggataa

SEQ ID NO: 659 - DNA, 4883 bp, Artificial Sequence
  Description of Artificial Sequence: Synthetic polynucleotide
gccttaattaggctgcgcgctcgctcgctcactgaggccgcccgggcaaagcccgggcgtcgggcgacctttggtcgcccggcctcagtgagcgagcgagcgcgcagagagggagtggccaactccatcactaggggttccttgtagttaatgattaacccgccatgctacttatctaccagggtaatggggatcctctagaactatagctagtcgacattgattattgactagttattaatagtaatcaattacggggtcattagttcatagcccatatatggagttccgcgttacataacttacggtaaatggcccgcctggctgaccgcccaacgacccccgcccattgacgtcaataatgacgtatgttcccatagtaacgccaatagggactttccattgacgtcaatgggtggagtatttacggtaaactgcccacttggcagtacatcaagtgtatcatatgccaagtacgccccctattgacgtcaatgacggtaaatggcccgcctggcattatgcccagtacatgaccttatgggactttcctacttggcagtacatctacgtattagtcatcgctattaccatgtcgaggccacgttctgcttcactctccccatctcccccccctccccacccccaattttgtatttatttattttttaattattttgtgcagcgatgggggcggggggggggggcgcgcgccaggcggggcggggcggggcgaggggcggggcggggcgaggcggagaggtgcggcggcagccaatcagagcggcgcgctccgaaagtttccttttatggcgaggcggcggcggcggcggccctataaaaagcgaagcgcgcggcgggcgggagcaagcttgaactgaaaaaccagaaagttaactggtaagtttagtctttttgtcttttatttcaggtcccggatccggtggtggtgcaaatcaaagaactgctcctcagtggatgttgcctttacttctaggcctgtacggaagtgttacttctgctctaaaagctgcggaattgtacccgcggccgatccaccggtatgtggactctcgggcgccgcgcagtagccggcctcctggcgtcacccagcccagcccaggcccagaccctcacccgggtcccgcggccggcagagttggccccactctgcggccgccgtggcctgcgcaccgacatcgatgcgacctgcacgccccgccgcgcaagttcgaaccaacgtggcctcaaccagatttggaatgtcaaaaagcagagtgtctatttgatgaatttgaggaaatctggaactttgggccacccaggctctctagatgagaccacctatgaaagactagcagaggaaacgctggactctttagcagagttttttgaagaccttgcagacaagccatacacgtttgaggactatgatgtctcctttgggagtggtgtcttaactgtcaaactgggtggagatctaggaacctatgtgatcaacaagcagacgccaaacaagcaaatctggctatcttctccatccagtggacctaagcgttatgactggactgggaaaaactgggtgtactcccacgacggcgtgtccctccatgagctgctggccgcagagctcactaaagccttaaaaaccaaactggacttgtcttccttggcctattccggaaaagatgcttgactcgaggacggggtgaactacgcctgaggatccgatctttttccctctgccaaaaattatggggacatcatgaagccccttgagcatctgacttctggctaataaaggaaatttattttcattgcaatagtgtgttggaattttttgtgtctctcactcggaagcaattcgttgatctgaatttcgaccacccataatacccattaccctggtagataagtagcatggcgggttaatcattaactacaaggaacccctagtgatggagttggccactccctctctgcgcgctcgctcgctcactgaggccgggcgaccaaaggtcgcccgacgcccgggctttgcccgggcggcctcagtgagcgagcgagcgcgcagccttaattaacctaattcactggccgtcgttttacaacgtcgtgactgggaaaaccctggcgttacccaacttaatcgccttgcagcacatccccctttcgccagctggcgtaatagcgaagaggcccgcaccgatcgcccttcccaacagttgcgcagcctgaatggcgaatgggacgcgccctgtagcggcgcattaagcgcggcgggtgtggtggttacgcgcagcgtgaccgctacacttgccagcgccctagcgcccgctcctttcgctttcttcccttcctttctcgccacgttcgccggctttccccgtcaagctctaaatcgggggctccctttagggttccgatttagtgctttacggcacctcgaccccaaaaaacttgattagggtgatggttcacgtagtgggccatcgccctgatagacggtttttcgccctttgacgttggagtccacgttctttaatagtggactcttgttccaaactggaacaacactcaaccctatctcggtctattcttttgatttataagggattttgccgatttcggcctattggttaaaaaatgagctgatttaacaaaaatttaacgcgaattttaacaaaatattaacgcttacaatttaggtggcacttttcggggaaatgtgcgcggaacccctatttgtttatttttctaaatacattcaaatatgtatccgctcatgagacaataaccctgataaatgcttcaataatattgaaaaaggaagagtatgagtattcaacatttccgtgtcgcccttattcccttttttgcggcattttgccttcctgtttttgctcacccagaaacgctggtgaaagtaaaagatgctgaagatcagttgggtgcacgagtgggttacatcgaactggatctcaacagcggtaagatccttgagagttttcgccccgaagaacgttttccaatgatgagcacttttaaagttctgctatgtggcgcggtattatcccgtattgacgccgggcaagagcaactcggtcgccgcatacactattctcagaatgacttggttgagtactcaccagtcacagaaaagcatcttacggatggcatgacagtaagagaattatgcagtgctgccataaccatgagtgataacactgcggccaacttacttctgacaacgatcggaggaccgaaggagctaaccgcttttttgcacaacatgggggatcatgtaactcgccttgatcgttgggaaccggagctgaatgaagccataccaaacgacgagcgtgacaccacgatgcctgtagcaatggcaacaacgttgcgcaaactattaactggcgaactacttactctagcttcccggcaacaattaatagactggatggaggcggataaagttgcaggaccacttctgcgctcggcccttccggctggctggtttattgctgataaatctggagccggtgagcgtgggtctcgcggtatcattgcagcactggggccagatggtaagccctcccgtatcgtagttatctacacgacggggagtcaggcaactatggatgaacgaaatagacagatcgctgagataggtgcctcactgattaagcattggtaactgtcagaccaagtttactcatatatactttagattgatttaaaacttcatttttaatttaaaaggatctaggtgaagatcctttttgataatctcatgaccaaaatcccttaacgtgagttttcgttccactgagcgtcagaccccgtagaaaagatcaaaggatcttcttgagatcctttttttctgcgcgtaatctgctgcttgcaaacaaaaaaaccaccgctaccagcggtggtttgtttgccggatcaagagctaccaactctttttccgaaggtaactggcttcagcagagcgcagataccaaatactgttcttctagtgtagccgtagttaggccaccacttcaagaactctgtagcaccgcctacatacctcgctctgctaatcctgttaccagtggctgctgccagtggcgataagtcgtgtcttaccgggttggactcaagacgatagttaccggataaggcgcagcggtcgggctgaacggggggttcgtgcacacagcccagcttggagcgaacgacctacaccgaactgagatacctacagcgtgagctatgagaaagcgccacgcttcccgaagggagaaaggcggacaggtatccggtaagcggcagggtcggaacaggagagcgcacgagggagcttccagggggaaacgcctggtatctttatagtcctgtcgggtttcgccacctctgacttgagcgtcgatttttgtgatgctcgtcaggggggcggagcctatggaaaaacgccagcaacgcggcctttttacggttcctggccttttgctggccttttgctcacatgttctttcctgcgttatcccctgattctgtggataaccgtattaccgcctttgagtgagctgataccgctcgccgcagccgaacgaccgagcgcagcgagtcagtgagcgaggaagcggaagagcgcccaatacgcaaaccgcctctccccgcgcgttggccgattcattaatgcagctggcacgacaggtttcccgactggaaagcgggcagtgagcgcaacgcaattaatgtgagttagctcactcattaggcaccccaggctttacactttatgcttccggctcgtatgttgtgtggaattgtgagcggataacaatttcacacaggaaacagctatgaccatgattacgccagatttaattaag

SEQ ID NO: 660 - DNA, 4829 bp, Artificial Sequence
  Description of Artificial Sequence: Synthetic polynucleotide
ctgcgcgctcgctcgctcactgaggccgcccgggcaaagcccgggcgtcgggcgacctttggtcgcccggcctcagtgagcgagcgagcgcgcagagagggagtgtagccatgctctaggaagatcaattcggtacaattcacgcgtcgacattgattattgactagttattaatagtaatcaattacggggtcattagttcatagcccatatatggagttccgcgttacataacttacggtaaatggcccgcctggctgaccgcccaacgacccccgcccattgacgtcaataatgacgtatgttcccatagtaacgccaatagggactttccattgacgtcaatgggtggagtatttacggtaaactgcccacttggcagtacatcaagtgtatcatatgccaagtacgccccctattgacgtcaatgacggtaaatggcccgcctggcattatgcccagtacatgaccttatgggactttcctacttggcagtacatctacgtattagtcatcgctattaccatgtcgaggccacgttctgcttcactctccccatctcccccccctccccacccccaattttgtatttatttattttttaattattttgtgcagcgatgggggcggggggggggggcgcgcgccaggcggggcggggcggggcgaggggcggggcggggcgaggcggagaggtgcggcggcagccaatcagagcggcgcgctccgaaagtttccttttatggcgaggcggcggcggcggcggccctataaaaagcgaagcgcgcggcgggcgggagcaagcttgaactgaaaaaccagaaagttaactggtaagtttagtctttttgtcttttatttcaggtcccggatccggtggtggtgcaaatcaaagaactgctcctcagtggatgttgcctttacttctaggcctgtacggaagtgttacttctgctctaaaagctgcggaattgtacccgcggccgatccaccggtatgtggactctcgggcgccgcgcagtagccggcctcctggcgtcacccagcccagcccaggcccagaccctcacccgggtcccgcggccggcagagttggccccactctgcggccgccgtggcctgcgcaccgacatcgatgcgacctgcacgccccgccgcgcaagttcgaaccaacgtggcctcaaccagatttggaatgtcaaaaagcagagtgtctatttgatgaatttgaggaaatctggaactttgggccacccaggctctctagatgagaccacctatgaaagactagcagaggaaacgctggactctttagcagagttttttgaagaccttgcagacaagccatacacgtttgaggactatgatgtctcctttgggagtggtgtcttaactgtcaaactgggtggagatctaggaacctatgtgatcaacaagcagacgccaaacaagcaaatctggctatcttctccatccagtggacctaagcgttatgactggactgggaaaaactgggtgtactcccacgacggcgtgtccctccatgagctgctggccgcagagctcactaaagccttaaaaaccaaactggacttgtcttccttggcctattccggaaaagatgcttgagcggccctagcgtttaaacgggccctctagagtcgacccgggcggcctcgaggacggggtgaactacgcctgaggatccgatctttttccctctgccaaaaattatggggacatcatgaagccccttgagcatctgacttctggctaataaaggaaatttattttcattgcaatagtgtgttggaattttttgtgtctctcactcggcctaggtagataagtagcatggcgggttaatcattaactacaaggaacccctagtgatggagttggccactccctctctgcgcgctcgctcgctcactgaggccgggcgaccaaaggtcgcccgacgcccgggctttgcccgggcggcctcagtgagcgagcgagcgcgcagccttaattaacctaattcactggccgtcgttttacaacgtcgtgactgggaaaaccctggcgttacccaacttaatcgccttgcagcacatccccctttcgccagctggcgtaatagcgaagaggcccgcaccgatcgcccttcccaacagttgcgcagcctgaatggcgaatgggacgcgccctgtagcggcgcattaagcgcggcgggtgtggtggttacgcgcagcgtgaccgctacacttgccagcgccctagcgcccgctcctttcgctttcttcccttcctttctcgccacgttcgccggctttccccgtcaagctctaaatcgggggctccctttagggttccgatttagtgctttacggcacctcgaccccaaaaaacttgattagggtgatggttcacgtagtgggccatcgccctgatagacggtttttcgccctttgacgttggagtccacgttctttaatagtggactcttgttccaaactggaacaacactcaaccctatctcggtctattcttttgatttataagggattttgccgatttcggcctattggttaaaaaatgagctgatttaacaaaaatttaacgcgaattttaacaaaatattaacgcttacaatttaggtggcacttttcggggaaatgtgcgcggaacccctatttgtttatttttctaaatacattcaaatatgtatccgctcatgagacaataaccctgataaatgcttcaataatattgaaaaaggaagagtatgagtattcaacatttccgtgtcgcccttattcccttttttgcggcattttgccttcctgtttttgctcacccagaaacgctggtgaaagtaaaagatgctgaagatcagttgggtgcacgagtgggttacatcgaactggatctcaacagcggtaagatccttgagagttttcgccccgaagaacgttttccaatgatgagcacttttaaagttctgctatgtggcgcggtattatcccgtattgacgccgggcaagagcaactcggtcgccgcatacactattctcagaatgacttggttgagtactcaccagtcacagaaaagcatcttacggatggcatgacagtaagagaattatgcagtgctgccataaccatgagtgataacactgcggccaacttacttctgacaacgatcggaggaccgaaggagctaaccgcttttttgcacaacatgggggatcatgtaactcgccttgatcgttgggaaccggagctgaatgaagccataccaaacgacgagcgtgacaccacgatgcctgtagcaatggcaacaacgttgcgcaaactattaactggcgaactacttactctagcttcccggcaacaattaatagactggatggaggcggataaagttgcaggaccacttctgcgctcggcccttccggctggctggtttattgctgataaatctggagccggtgagcgtgggtctcgcggtatcattgcagcactggggccagatggtaagccctcccgtatcgtagttatctacacgacggggagtcaggcaactatggatgaacgaaatagacagatcgctgagataggtgcctcactgattaagcattggtaactgtcagaccaagtttactcatatatactttagattgatttaaaacttcatttttaatttaaaaggatctaggtgaagatcctttttgataatctcatgaccaaaatcccttaacgtgagttttcgttccactgagcgtcagaccccgtagaaaagatcaaaggatcttcttgagatcctttttttctgcgcgtaatctgctgcttgcaaacaaaaaaaccaccgctaccagcggtggtttgtttgccggatcaagagctaccaactctttttccgaaggtaactggcttcagcagagcgcagataccaaatactgttcttctagtgtagccgtagttaggccaccacttcaagaactctgtagcaccgcctacatacctcgctctgctaatcctgttaccagtggctgctgccagtggcgataagtcgtgtcttaccgggttggactcaagacgatagttaccggataaggcgcagcggtcgggctgaacggggggttcgtgcacacagcccagcttggagcgaacgacctacaccgaactgagatacctacagcgtgagctatgagaaagcgccacgcttcccgaagggagaaaggcggacaggtatccggtaagcggcagggtcggaacaggagagcgcacgagggagcttccagggggaaacgcctggtatctttatagtcctgtcgggtttcgccacctctgacttgagcgtcgatttttgtgatgctcgtcaggggggcggagcctatggaaaaacgccagcaacgcggcctttttacggttcctggccttttgctggccttttgctcacatgttctttcctgcgttatcccctgattctgtggataaccgtattaccgcctttgagtgagctgataccgctcgccgcagccgaacgaccgagcgcagcgagtcagtgagcgaggaagcggaagagcgcccaatacgcaaaccgcctctccccgcgcgttggccgattcattaatgcagctggcacgacaggtttcccgactggaaagcgggcagtgagcgcaacgcaattaatgtgagttagctcactcattaggcaccccaggctttacactttatgcttccggctcgtatgttgtgtggaattgtgagcggataacaatttcacacaggaaacagctatgaccatgattacgccagatttaattaaggccttaattagg

SEQ ID NO: 661 - DNA, 4883 bp, Artificial Sequence; identical to SEQ ID NO: 581
  Description of Artificial Sequence: Synthetic polynucleotide

SEQ ID NO: 662 - DNA, 4883 bp, Artificial Sequence; identical to SEQ ID NO: 659
  Description of Artificial Sequence: Synthetic polynucleotide

SEQ ID NO: 663 - DNA, 2101 bp, Artificial Sequence
  Description of Artificial Sequence: Synthetic polynucleotide
ctgcgcgctcgctcgctcactgaggccgcccgggcaaagcccgggcgtcgggcgacctttggtcgcccggcctcagtgagcgagcgagcgcgcagagagggagtgtagccatgctctaggaagatcaattcggtacaattcacgcgtcgacattgattattgactctggtcgttacataacttacggtaaatggcccgcctggctgaccgcccaacgaccccgcccattgacgtcaataatgacgtatgttcccatagtaacgccaatagggactttccattgacgtcaatgggtggagtatttacggtaaactgcccacttggcagtacatcaagtgtatcatatgccaagtacgccccctattgacgtcaatgacggtaaatggcccgcctggcattatgcccagtacatgaccttatgggactttcctacttggcagtacatctactcgaggccacgttctgcttcactctccccatctcccccccctccccacccccaattttgtatttatttattttttaattattttgtgcagcgatgggggcggggggggggggggggggggcgcgcgccaggcggggcggggcggggcgaggggcggggcggggcgaggcggagaggtgcggcggcagccaatcagagcggcgcgctccgaaagtttccttttatggcgaggcggcggcggcggcggccctataaaaagcgaagcgcgcggcgggcgggagcgggatcagccaccgcggtggcggccctagagtcgatcgaggaactgaaaaaccagaaagttaactggtaagtttagtctttttgtcttttatttcaggtcccggatccggtggtggtgcaaatcaaagaactgctcctcagtggatgttgcctttacttctaggcctgtacggaagtgttacttctgctctaaaagctgcggaattgtacccgcggccgatccaccggtcgccaccatggtgagcaagggcgaggagctgttcaccggggtggtgcccatcctggtcgagctggacggcgacgtaaacggccacaagttcagcgtgtccggcgagggcgagggcgatgccacctacggcaagctgaccctgaagttcatctgcaccaccggcaagctgcccgtgccctggcccaccctcgtgaccaccctgacctacggcgtgcagtgcttcagccgctaccccgaccacatgaagcagcacgacttcttcaagtccgccatgcccgaaggctacgtccaggagcgcaccatcttcttcaaggacgacggcaactacaagacccgcgccgaggtgaagttcgagggcgacaccctggtgaaccgcatcgagctgaagggcatcgacttcaaggaggacggcaacatcctggggcacaagctggagtacaactacaacagccacaacgtctatatcatggccgacaagcagaagaacggcatcaaggtgaacttcaagatccgccacaacatcgaggacggcagcgtgcagctcgccgaccactaccagcagaacacccccatcggcgacggccccgtgctgctgcccgacaaccactacctgagcacccagtccgccctgagcaaagaccccaacgagaagcgcgatcacatggtcctgctggagttcgtgaccgccgccgggatcactctcggcatggacgagctgtacaagtaaagcggccatcaagcttatcgataccgtcgactagagctcgctgatcagcctcgactgtgccttctagttgccagccatctgttgtttgcccctcccccgtgccttccttgaccctggaaggtgccactcccactgtcctttcctaataaaatgaggaaattgcatcgcattgtctgagtaggtgtcattctattctggggggtggggtggggcaggacagcaagggggaggattgggaagacaattaggtagataagtagcatggcgggttaatcattaactacaaggaacccctagtgatggagttggccactccctctctgcgcgctcgctcgctcactgaggccgggcgaccaaaggtcgcccgacgcccgggctttgcccgggcggcctcagtgagcgagcgagcgcgcag
